(19) United States
(12) Patent Application Publication
(10) Pub. No.: US 2025/0243549 A1
(43) Pub. Date: Jul. 31, 2025

(54) Reproducible Double Unique Dual Indexing Library Construction Method for Next Generation Sequencing of microRNA Isoform and Use Thereof

(71) Applicant: Jiansheng Medical Technology Co., Ltd., Beijing (CN)

(72) Inventors: Jiawang WANG, Beijing (CN); Bin ZHANG, Beijing (CN)

(21) Appl. No.: 18/425,986

(22) Filed: Jan. 29, 2024

(51) Int. Cl. C12Q 1/6886; C12Q 1/6806; C12Q 1/6851; C12Q 1/6874; G16B 30/00; G16B 40/20

(52) U.S. Cl. CPC C12Q 1/6886; C12Q 1/6851; C12Q 1/6874; G16B 30/00; G16B 40/20; C12Q 1/6806; C12Q 2600/16; C12Q 2600/178

(57) ABSTRACT

The present disclosure provides a reproducible double unique dual indexing library construction method for next generation sequencing of a microRNA isoform (isomiR) and a use thereof, and belongs to the technical field of gene sequencing. The present disclosure discloses a primer set for amplification of an isomiR, including a universal sequence and a 5′-terminus amplification primer linked sequentially to a partial sequence of a 5′ terminus of a miRNA. The primer set can allow the amplification of different isoforms of a microRNA (miRNA), with characteristics such as high sensitivity, high relative sequencing depth, and high specificity. The present disclosure also discloses a double unique dual indexing technology for multiplex next-generation sequencing (NGS) to solve the problems of NGS of high-throughput samples, and the double unique dual indexing technology has characteristics such as excellent repeatability, high detection accuracy, and low detection cost and can allow the artificial intelligent diagnosis of a tumor based on NGS.

### TECHNICAL FIELD

[0001] The present disclosure belongs to the technical field of gene sequencing, and specifically relates to a reproducible double unique dual indexing library construction method for next generation sequencing of a microRNA isoform (isomiR) and a use thereof.

### REFERENCE TO SEQUENCE LISTING

[0002] A computer readable XML file entitled “GWP20240100524_seqlist”, that was created on Mar. 28, 2024, with a file size of about 1,812,085 bytes, contains the sequence listing for this application, has been filed with this application, and is hereby incorporated by reference in its entirety.

### BACKGROUND

[0003] microRNAs (miRNAs) are ideal biomarkers for cancers, miRNAs are a class of small non-coding RNAs each with a length of 18 to 25 nucleotides, miRNAs directly and indirectly regulate the expression of most genes, and participate in a series of life activities, including cell proliferation, apoptosis, organogenesis, hematopoiesis, and development, miRNAs are closely related to the occurrence and progression of tumors. Increasing studies have shown that miRNAs play an important regulatory role in the occurrence and progression of tumors. Malignant tumors are results of an interaction between genetic factors and environmental factors, where environmental factors play a greater role than genetic factors. The genetic diagnosis of cancers has great limitations, and can only discover susceptibility genes, which cannot be used as biomarkers for the diagnosis of malignant tumors. In addition, environmental factors are not monitorable and can only serve as risk factors for malignant tumors, miRNAs are a large class of regulatory factors between changing environments and unchanging genetic materials, and are major bridges connecting environmental factors and genetic factors. Therefore, miRNAs may be desirable biomarkers for malignant tumors, miRNAs are very stable in blood, and plasma miRNAs are relatively stable under harsh conditions such as freezing and thawing, high-temperature (up to 37° C.) storage, acidic conditions, and ribonuclease digestion. Compared with protein markers and mRNA expression profiles, miRNA expression abnormalities appear earlier, can be used to more accurately distinguish tumor types, are more beneficial for early diagnosis, and are more suitable as markers for tumor diagnosis. Due to these characteristics, miRNAs are very attractive as non-invasive biomarkers, and are suitable as biomarkers for diseases. Recent evidences have shown that circulating miRNAs in blood can be used as biomarkers for the etiology, diagnosis, progression, recurrence, and treatment outcomes of tumors.

[0004] Based on the principle of base pairing, miRNAs can bind to messenger RNAs (mRNAs) to specifically inhibit the translation of the mRNAs. About more than 8,000 miRNAs have been discovered in humans. Each miRNA can regulate the expression of hundreds or even thousands of genes. Moreover, miRNAs, like hormones, can be secreted by cells into a blood circulation flow and delivered to other adjacent or distant cells to play a role. Therefore, miRNAs directly or indirectly regulate almost all genes and regulate various functions of cells. Indeed, miRNAs can reverse cancer cells into normal cells and turn differentiated cells into stem cells, and the knockout of miRNAs in mice is embryonically lethal.

[0005] Due to an important role of miRNAs in gene regulation, the abnormal expression of miRNAs is closely related to various diseases such as cancers. It has been found that the dysregulation of miRNAs is associated with more than 400 diseases. When a body is endangered by pathogenic microorganisms or cancer cells, an immune response requires the rapid and highly-coordinated systemic regulation of many genes to establish an effective defense to identify and eliminate pathogenic factors. The miRNA-mediated gene regulation is faster than other epigenetic mechanisms (such as methylation) that require transcription. Only a miRNA regulatory network can meet the need of such rapid gene regulation.

[0006] Compared with other molecular assays, miRNA assays undoubtedly have tremendous advantages, miRNAs are very stable in blood, and plasma miRNAs are stable under harsh conditions such as freezing and thawing, high-temperature storage, acidic conditions, and ribonuclease digestion. As a result, miRNAs are very attractive as biomarkers, and are very suitable as biomarkers for diseases. The clinical applied research of miRNAs has become one of the hot spots. However, the research on miRNAs as biomarkers for gastric cancer inside and outside China is still at a laboratory research stage, and miRNAs have not been successfully used in the clinical diagnosis of gastric cancer.

[0007] Through detailed and accurate analysis of miRNA sequences by a high-throughput sequencing technology, isomiRs are discovered (Gómez-Martín C, Aparicio-Puerta E, van Eijndhoven M A, et al.). Accordingly, the early belief that each miRNA gene produces only one mature miRNA sequence is overturned. A miRNA is not a single sequence, but consists of a series of isomiRs with different lengths/sequences and expressions. These isomiRs are different from cach other merely in one or a few bases. These isomiRs are diverse in expressions and sequences, and even introduce a variety of 5′ termini and seed regions. Specific miRNA loci can have abnormal expression patterns in diseased tissues. Some isomiRs have been proved to have important biological functions. Mechanisms for producing isomiRs mainly include: inaccurate or selective cleavage of Darsha and Dicer enzymes during miRNA processing and maturation; addition of a nucleotide at a 3′ terminus; and RNA editing and single nucleotide polymorphism (SNP). Major manifestations include: 5′-terminus trimming, 3′-terminus trimming, 3′-terminus nucleotide addition, and base substitution. The 5′-terminus trimming and base substitution can occur within a seed region, resulting in seed shifting. The expression of different isoforms of a same miRNA varies greatly and is tissue-specific. In particular, the expression specificity of an isoform in a pathological tissue can be used as a biomarker for diagnosis of a disease. IsomiR is a functional and independent molecule that can regulate the expression of a gene like a corresponding precursor of the isomiR, and the expression of isomiR is accurately regulated in different tissues under different pathological conditions. Each miRNA seems to have a large number of isoforms. Therefore, the research and application of miRNAs should go deep into an isomiR level to obtain accurate results. Comparatively, there are many isomiRs at a 3′ terminus.

[0008] Because miRNAs each include only about 20 bases and are at a low level in blood, it is difficult to detect miRNAs, and there is a lack of techniques to accurately detect miRNAs. Quantitative polymerase chain reaction (qPCR), microarrays, and small RNA sequencing (RNA-seq) are commonly used in the research on expression of miRNAs in tissues. However, these techniques all have defects to varying degrees. The microarray technique mainly has problems such as low sensitivity and relatively-long turnaround time, and the qPCR technique is not easy to detect a large number of miRNAs. In numerous studies, study results of circulating miRNAs have extremely-low reproducibility. Detection results of different laboratories are not comparable to each other, and may even be opposite to each other. Summarized results of 11 studies show that 31 miRNAs associated with heart failure are identified in one study, and only five of the miRNAs can be reproduced in another study, but none of the miRNAs can be replicated in more than two studies, which fully indicates that the existing qPCR technique for detecting miRNAs has serious shortcomings. These shortcomings greatly limit the application of the qPCR technique in clinical quantitative detection of extracellular miRNAs. For example, miRNAs have not been successfully used in the cancer diagnosis.

[0009] In addition, next-generation sequencing (NGS) (small RNA-seq), as a rising star, has received extremely-extensive attention due to its advantages such as high versatility and accuracy to a single base, and can be used for the detection of gene expression. The detection of gene expression should in fact be the largest application market for NGS. Unfortunately, the first half of steps of NGS to detect the gene expression are the same as the first half of steps of qPCR to detect the gene expression, and thus the problems of NGS to detect the gene expression are also faced by qPCR. The qPCR technique mentioned above has serious shortcomings, and thus the qPCR technique must be subversively innovated to allow the successful application of the qPCR technique in clinical practice, which is also applicable to the NGS to detect the gene expression.

[0010] While the NGS small RNA-seq works excellently for the discovery of new miRNAs, the NGS small RNA-seq is not suitable for applications requiring high-throughput samples or fast turnarounds. In order to improve the efficiency, a capacity of a sequencing chip should be as high as possible. NGS can produce a large amount of data, for example, 6,000 Gb (6 Tb) of data can be acquired at a time when Illumina sequencing is conducted with an S4 flow cell. In addition, a quantity of sequencing data of a sample is often relatively small. As a result, a plurality of samples often needs to be pooled for sequencing. To allow this objective, each sample needs to be labeled specifically. Although the current unique dual indexing technology can theoretically label thousands of samples, the labeling of high-throughput samples is not possible due to various difficulties in practice. About 100 samples are adopted at most for the miRNA sequencing in the literature. In view of the huge data quantity that can be produced by the technique, such a small sample quantity is far from sufficient. Ideally, in clinical applications, tens of thousands of patient samples should be treated in a single run.

### SUMMARY

[0011] In view of this, a first objective of the present disclosure is to provide a primer set for amplification of an isomiR, including a universal sequence and a primer linked to a partial sequence of a 5′ terminus of a miRNA. The primer set allows the amplification of different isoforms of a same miRNA.

[0012] A second objective of the present disclosure is to provide a double unique dual indexing amplification primer set for construction of a high-throughput sample library for NGS, including an inner dual index and an outer dual index. When the primer set including a combination of an outer unique dual index (OUDI) and an inner unique dual index (IUDI) is used to amplify samples and then amplification products are pooled, detection requirements of high-throughput samples can be met.

[0013] The present disclosure provides a primer set for amplification of an isomiR, including a universal sequence and a 5′-terminus amplification primer linked sequentially to a partial sequence of a 5′ terminus of a miRNA.

[0014] Preferably, the miRNA includes at least one selected from the group consisting of the following: hsa-miR-21-5p, hsa-miR-223-3p, hsa-miR-223-5p, hsa-miR-186-5p, hsa-miR-18a-5p, hsa-miR-146b-5p, hsa-miR-624-5p, hsa-miR-106b-5p, hsa-miR-340-5p, hsa-miR-20a-5p, hsa-miR-451a, hsa-miR-7976, hsa-miR-2355-3p, hsa-miR-301a-3p, hsa-miR-144-5p, hsa-miR-151a-3p, hsa-miR-3200-5p, hsa-miR-1537-3p, hsa-miR-500a-5p, hsa-miR-127-3p, hsa-miR-570-3p, hsa-miR-130b-5p, hsa-miR-503-5p, hsa-miR-551a, hsa-miR-409-3p, hsa-miR-330-3p, hsa-miR-889-3p, hsa-miR-625-5p, hsa-miR-542-3p, hsa-miR-582-3p, hsa-miR-381-3p, hsa-miR-495-3p, hsa-miR-103a-1-5p, hsa-miR-450b-5p, hsa-miR-429, hsa-miR-576-5p, hsa-miR-148b-3p, hsa-miR-320c, hsa-miR-4286, hsa-miR-126-3p, hsa-miR-152-3p, hsa-miR-144-3p, hsa-miR-195-5p, hsa-let-7a-5p, hsa-miR-378f, hsa-miR-126-5p, hsa-miR-26a-5p, hsa-miR-29a-3p, hsa-miR-181a-5p, hsa-miR-32-5p, hsa-miR-142-3p, hsa-miR-29c-3p, hsa-miR-424-5p, hsa-miR-143-3p, hsa-miR-30c-5p, hsa-miR-192-5p, hsa-miR-146a-5p, hsa-miR-101-3p, hsa-miR-19b-3p, hsa-miR-33b-5p, hsa-miR-378a-3p, hsa-miR-22-3p, hsa-miR-107, hsa-miR-497-5p, hsa-miR-15a-3p, hsa-miR-188-5p, hsa-let-7d-3p, hsa-miR-132-3p, hsa-miR-151a-5p, hsa-miR-194-5p, hsa-miR-99a-5p, hsa-miR-125b-5p, hsa-miR-25-3p, hsa-miR-103a-3p, hsa-miR-1285-3p, hsa-miR-7977, hsa-miR-30b-5p, hsa-miR-363-3p, hsa-miR-93-5p, hsa-miR-375-3p, hsa-miR-99b-5p, hsa-miR-193b-3p, hsa-miR-324-3p, hsa-miR-193a-3p, hsa-miR-342-3p, hsa-miR-484, hsa-miR-532-3p, hsa-miR-210-3p, hsa-miR-2110, hsa-miR-296-5p, hsa-miR-1307-5p, hsa-miR-19a-3p, hsa-miR-139-5p, hsa-miR-3665, hsa-miR-RG-84, hsa-miR-4454, and hsa-let-7b-5p; and
[0015] nucleotide sequences of corresponding 5′-terminus amplification primers are shown in SEQ ID NO: 1 to SEQ ID NO: 97, respectively.

[0016] Preferably, the primer set for amplification of an isomiR further includes a second polymerase chain reaction (PCR) preamplification primer pair and/or a third PCR preamplification primer pair;
[0017] the second PCR preamplification primer pair includes a transition primer and a reverse primer for amplifying the isomiR;
[0018] a nucleotide sequence of the transition primer is shown in SEQ ID NO: 99;
[0019] a nucleotide sequence of the reverse primer for amplifying the isomiR is shown in SEQ ID NO: 100;
[0020] the third PCR preamplification primer pair includes a 5′ universal primer and a 3′ universal primer;
[0021] a nucleotide sequence of the 5′ universal primer is shown in SEQ ID NO: 101; and
[0022] a nucleotide sequence of the 3′ universal primer is shown in SEQ ID NO: 102.

[0023] The present disclosure provides a method for amplifying an isomiR, including the following steps:
[0024] extracting total RNA from each of a gastric cancer sample and a non-gastric cancer sample, and reverse-transcribing the total RNA into cDNA;
[0025] with the cDNA as a template, conducting a first PCR preamplification using the primer set described above to obtain a first preamplification product;
[0026] with the first preamplification product as a template, conducting a second PCR preamplification using the transition primer and the reverse primer for amplifying the isomiR in the primer set described above to obtain a second preamplification product; and
[0027] with the second preamplification product as a template, conducting a third PCR preamplification using the 5′ universal primer and the 3′ universal primer in the primer set described above to obtain a third preamplification product, which is the isomiR.

[0028] The present disclosure provides a double unique dual indexing amplification primer set for construction of a high-throughput sample library for NGS, including primers for adding an inner double unique dual index (DUDI) and primers for adding an outer DUDI and a sequencing adapter,
[0029] where a forward primer among the primers for adding an inner DUDI is obtained by linking a DNA fragment shown in SEQ ID NO: 2055, an I5 Index sequence, and a DNA fragment shown in SEQ ID NO: 2056 sequentially;
[0030] a reverse primer among the primers for adding an inner DUDI is obtained by linking a DNA fragment shown in SEQ ID NO: 2057, an I7 Index sequence, and a DNA fragment shown in SEQ ID NO: 2058 sequentially;
[0031] a forward primer among the primers for adding an outer DUDI and a sequencing adapter is obtained by linking a DNA fragment shown in SEQ ID NO: 2059, the I5 Index sequence, and a DNA fragment shown in SEQ ID NO: 2060 sequentially;
[0032] a reverse primer among the primers for adding an outer DUDI and a sequencing adapter is obtained by linking a DNA fragment shown in SEQ ID NO: 2061, the I7 Index sequence, and a DNA fragment shown in SEQ ID NO: 2062 sequentially;
[0033] a nucleotide sequence of the I5 Index sequence is one selected from the group consisting of SEQ ID NO: 103 to SEQ ID NO: 1078; and
[0034] a nucleotide sequence of the I7 Index sequence is one selected from the group consisting of SEQ ID NO: 1079 to SEQ ID NO: 2054.

[0035] The present disclosure provides a kit for construction of a high-throughput sample library for NGS, including the primer set for amplification of an isomiR described above, the double unique dual indexing amplification primer set described above, and 2× boost mix,
[0036] where the 2× Boost mix includes the following components: water as a solvent, Tris-HCl: 70 mmol/L to 80 mmol/L, (NH₄)₂SO₄: 15 mmol/L to 25 mmol/L, Triton-100: 0.08% to 0.12% in a volume concentration, MgCl₂: 2 mmol/L to 3 mmol/L, dNTPs: 150 μmol/L to 250 μmol/L, trehalose: 190 mmol/L to 210 mmol/L, and hot-start Taq DNA polymerase: 45,000 U/L to 55,000 U/L; a pH of the Tris-HCl is 8.5 to 9.0; and
[0037] the dNTPs refers to a dNTP mixed solution that includes UDG and does not include dUTP.

[0038] The present disclosure provides a method for construction of a high-throughput sample library for NGS, including the following steps:
[0039] with the third preamplification product obtained by the method described above as a template, conducting a first PCR amplification using the primers for adding an inner DUDI in the double unique dual indexing amplification primer set described above to obtain an IUDI-containing PCR product;
[0040] with the IUDI-containing PCR product as a template, conducting a second PCR amplification using the primers for adding an outer DUDI and a sequencing adapter in the double unique dual indexing amplification primer set described above to obtain a DUDI-containing PCR product; and pooling to obtain a sequencing library.

[0041] The present disclosure provides a method for construction of a high-throughput sample library for NGS, including the following step:
[0042] with the third preamplification product obtained by the method described above as a template, conducting a PCR amplification using the double unique dual indexing amplification primer set described above to obtain a DUDI-containing PCR product.

[0043] Preferably, the method for construction of a high-throughput sample library for NGS further includes: precipitating a pooled DUDI-containing PCR product, and removing PCR primers from a product precipitate with an ExoI enzyme to obtain the sequencing library.

[0044] The present disclosure provides a use of the primer set for amplification of an isomiR described above, an isomiR amplified by the method described above, or the double unique dual indexing amplification primer set described above in construction of a prediction model for artificial intelligent diagnosis of a tumor based on NGS.

[0045] Preferably, the tumor includes gastric cancer.

[0046] The primer set for amplification of an isomiR provided in present disclosure includes a universal sequence and a 5′-terminus amplification primer linked sequentially to a partial sequence of a 5′ terminus of an isomiR. In the present disclosure, the universal sequence is added to a 3′ terminus, that is, sequences of 3′ termini of cDNAs of all miRNAs are the same. In the general traditional NGS, a 5′ terminus is miRNA-specific, that is, amplification primers for different miRNAs are different, but in order to amplify isoforms of a same miRNA, amplification primers for each miRNA are universal to isoforms of the miRNA, that is, amplification primers for a miRNA can be used to amplify all isoforms of the miRNA. For this reason, in the present disclosure, amplification primers for each miRNA are designed according to a universal sequence and a primer linked sequentially to a partial sequence of a 5′ terminus of an isomiR, and isomiRs can be successfully amplified with the amplification primers. As a most obvious advantage, the primers provided by the present disclosure can be selected according to a corresponding miRNA to be amplified. Thus, the primers have the following advantages: 1. High sensitivity: The primers provided in the present disclosure can be used to detect miRNAs that cannot be detected by the conventional methods. Because all miRNAs are detected in the conventional methods and concentrations of miRNAs may vary by a factor of several thousands, only miRNAs with relatively-high expression levels may be detected at a specified sequencing depth. However, the early diagnosis of tumors requires the detection of miRNAs at relatively-low concentrations, which obviously cannot be allowed by the current miRNA second-generation detection technologies. The method provided by the present disclosure can effectively solve this problem. 2. High relative sequencing depth: For amplification of the same low-expression miRNAs, due to significant amplification and avoidance of high-expression miRNAs, a relative sequencing depth of the technology with the primers of the present disclosure can be much higher than a relative sequencing depth of a conventional technology. 3. High specificity: Because an adapter is indiscriminately added to each of two termini of cDNA in the conventional technology, NGS data of the conventional technology include a large number of useless sequences in addition to miRNA sequences, such as tRNA and other small RNA sequences, resulting in a low efficiency. The primer set provided by the present disclosure can meet the requirements of specific amplification, and includes few useless sequences, resulting in a high efficiency.

[0047] The present disclosure provides a double unique dual indexing amplification primer set for construction of a high-throughput sample library for NGS, including primers for adding an inner DUDI and primers for adding an outer DUDI and a sequencing adapter, where a forward primer among the primers for adding an inner DUDI is obtained by linking a DNA fragment shown in SEQ ID NO: 2055, an I5 Index sequence, and a DNA fragment shown in SEQ ID NO: 2056 sequentially; a reverse primer among the primers for adding an inner DUDI is obtained by linking a DNA fragment shown in SEQ ID NO: 2057, an I7 Index sequence, and a DNA fragment shown in SEQ ID NO: 2058 sequentially; a forward primer among the primers for adding an outer DUDI and a sequencing adapter is obtained by linking a DNA fragment shown in SEQ ID NO: 2059, the I5 Index sequence, and a DNA fragment shown in SEQ ID NO: 2060 sequentially; a reverse primer among the primers for adding an outer DUDI and a sequencing adapter is obtained by linking a DNA fragment shown in SEQ ID NO: 2061, the I7 Index sequence, and a DNA fragment shown in SEQ ID NO: 2062 sequentially; a nucleotide sequence of the I5 Index sequence is one selected from the group consisting of SEQ ID NO: 103 to SEQ ID NO: 1078; and a nucleotide sequence of the I7 Index sequence is one selected from the group consisting of SEQ ID NO: 1079 to SEQ ID NO: 2054. The primer set includes an inner dual index and an outer dual index, which facilitates the subsequent addition of the indexes to a DNA fragment to be sequenced of an amplified sample through PCR amplification. Each primer includes a pair of specific base sequences (I5 Index or I7 Index), which is obtained as follows: 10 base-unique short sequences are randomly produced, complementary sequences are removed, and then a DUDI is screened out according to the following criteria: a same base should not be repeated three or more times; a sequence is not seriously complementary to other sequences; a sequence is at least 3 bases different from other sequences; after two sequences of a same DUDI bind to surrounding sequences, the specific amplification of the primer is not affected, that is, the possibility of producing a primer dimer is not increased; and a score of pairing between two sequences is calculated, and a pair with a minimum score (namely, maximum specificity) is selected as a barcode index added in a same sample. According to the above criteria, 976 pairs of DUDIs are screened out for high-throughput samples of NGS. In addition, because sequences of different DUDIs are at least 3 bases different from each other, the primers developed based on the double unique dual indexing technology still maintain their uniqueness and will not have other unique dual indexes even if there is a sequencing error and one base mismatch is allowed. Thus, the indexing has a very high accuracy. In terms of this advantage, the method of the present disclosure is also superior to the conventional method. Because a large number of sequences need to be indexed in the conventional method, for example, 2,000 sequences need to be indexed for 1,000 samples, a probability of false indexing of the conventional method is at least 5 times a probability of false indexing of the method of the present disclosure. In the present disclosure, a large number of samples are analyzed, and more than 400 G of data are acquired, but there is no mismatched NGS read.

[0048] In addition, when PCR amplification is conducted with the primers, a sequencing adapter and a barcode index sequence are added simultaneously. After a library is constructed in this way, each DNA molecule includes an OUDI and an IUDI. Through the combination of OUDIs and IUDIs in different quantities, a corresponding number of samples can be pooled. For example, if 1,000 samples need to be pooled for sequencing, the samples are first indexed with 200 pairs of IUDIs, where the 200 pairs of IUDIs can index the 1,000 samples in 5 groups, and then different OUDIs can be added to the 5 groups of samples each with the same unique dual indexes during library construction, such that the samples can be distinguished. With this simple double unique dual indexing technology, tens of thousands of samples can be specifically indexed and then pooled together for sequencing, which allows the pooled sequencing of any number of samples. The provision of the primers can greatly reduce the sequencing and primer costs. The double unique dual indexing technology adopts a multiply operation, while the traditional dual indexing technology adopts an addition operation. For example, if 205 pairs of primers are synthesized, 1,000 samples can be indexed by the double unique dual indexing technology, but only 205 samples can be indexed by the traditional dual indexing technology, and it is necessary to consider that one or two of the 205 pairs of indexes cannot be the same as indexes of other samples before loading for sequencing in the traditional dual indexing technology, which is troublesome and sometimes cannot be satisfied. With the primers developed based on the double unique dual indexing technology in the present disclosure, it is merely necessary to consider that one or two of the 5 pairs of outer indexes cannot be the same as indexes of other samples, which greatly reduces the possibility of an index conflict and allows the simultaneous sequencing of 1,000 samples. In addition, compared with the existing technologies, the double unique dual indexing technology can greatly reduce a cost of primer synthesis.

[0049] NGS-associated primers are relatively long and usually have a length of larger than 50 bp, and require NGS-grade purification, resulting in a high cost. The primers developed by the present disclosure can reduce a cost by at least 5 times, and can also simplify the split and increase the operability. In the method of the present disclosure, a plurality of samples are divided into several groups, for example, 1,000 samples are divided into 5 groups, and thus only 200 samples need to be split in each group. The method of the present disclosure, which involves only one large group but 1,000 samples, makes the computer splitting easier than the conventional method.

[0050] The present disclosure provides a use of the primer set for amplification of an isomiR described above, an isomiR amplified by the method described above, or the double unique dual indexing amplification primer set described above in construction of a prediction model for artificial intelligent diagnosis of a tumor based on NGS. In the present disclosure, NGS is conducted with a high-throughput sample isomiR library conducted based on the double unique dual indexing amplification primer set, and then a machine learning model is constructed based on NGS results. The machine learning model constructed has excellent prediction performance due to the excellent repeatability of the NGS results of the present disclosure. Experimental results show that two confusion matrices for mutual authentication both have an accuracy of 95% and a sensitivity and specificity of 90% or more, indicating that NGS data of the two times are highly similar, that is, the biological repeatability is high. NGS data of a third batch (a third confusion matrix) predicted by a second model also have an accuracy of 95% and a sensitivity and specificity of 90% or more, indicating that multiple times of NGS of a same sample have high biological repeatability. What is more important is whether the machine learning model constructed is universal, that is, whether the machine learning model can be used to predict NGS data of different samples. NGS data of another batch of completely different samples are successfully predicted by the second model above (a fourth confusion matrix). NGS data of a second batch of completely different samples are also successfully predicted by the same model (a fifth confusion matrix). While a confusion matrix has lower accuracy, sensitivity, and specificity than the prediction of NGS data of the same samples from different batches, it is expected, and given that a large amount of data is required for modeling by machine learning (because gastric cancer has high genetic heterogeneity), 200 samples are insufficient. However, importantly, P values of confusion matrices are low, indicating that prediction results are very statistically significant and cannot be coincidental.

[0051] These experimental results fully show that the prediction model for artificial intelligent diagnosis of a tumor based on NGS constructed in the present disclosure can effectively distinguish between gastric cancer and non-gastric cancer diseases (gastritis, gastric ulcer, gastric erosion, and other gastric discomforts), and has excellent biological repeatability (when different samples are adopted). The sensitivity and specificity of prediction by the prediction model both can reach 90% or more. It indicates that the double unique dual indexing technology for multiplex NGS and corresponding primers developed in the present disclosure have both high technical repeatability and high biological repeatability, and can detect a natural variation of a biological sample, that is, specific detection results. If a detection is not specific, a non-specific signal masks a specific signal, and thus it is impossible to obtain such a specific detection result. The above-mentioned NGS results prove from the technical repeatability and the biological repeatability that the NGS library construction technology for isomiRs developed in the present disclosure has high repeatability and can be used for artificial intelligent diagnosis of a tumor.

### BRIEF DESCRIPTION OF THE DRAWINGS

[0052] FIG. 1 is a schematic diagram of a principle of a DUDI technology for high-throughput samples of NGS;

[0053] FIG. 2 is a scatter plot of principal component analysis (PCA) for NGS results of three replicated batches;

[0054] FIG. 3 is a histogram of Silhouette scores of PCA for NGS results of three replicated batches; and

[0055] FIGS. 4A-4E show the comparison of confusion matrices for machine learning.

### DETAILED DESCRIPTION OF THE EMBODIMENTS

[0056] The present disclosure provides a primer set for amplification of an isomiR, including a universal sequence and a 5′-terminus amplification primer linked sequentially to a partial sequence of a 5′ terminus of a miRNA.

[0057] In the present disclosure, in order to allow the amplification of isomiRs, a universal sequence is sequentially linked to a partial sequence of a 5′ terminus of a target miRNA, which ensures both the specific amplification of a miRNA and the amplification of all different isoforms of a specific miRNA and also allows the flexibility of a test object. In an embodiment of the present disclosure, the universal sequence is ATAGACTCCTCGCATAGCCTCATGAGTC (SEQ ID NO: 2057). A length of the partial sequence of the 5′ terminus of the miRNA is preferably 12 nt to 14 nt and more preferably 13 nt.

[0058] In an embodiment of the present disclosure, in order to prove that the primer set provided in the present disclosure can allow the amplification of isomiRs, a miRNA associated with gastric cancer is illustrated as an example. The miRNA preferably includes at least one selected from the group consisting of the following: hsa-miR-21-5p, hsa-miR-223-3p, hsa-miR-223-5p, hsa-miR-186-5p, hsa-miR-18a-5p, hsa-miR-146b-5p, hsa-miR-624-5p, hsa-miR-106b-5p, hsa-miR-340-5p, hsa-miR-20a-5p, hsa-miR-451a, hsa-miR-7976, hsa-miR-2355-3p, hsa-miR-301a-3p, hsa-miR-144-5p, hsa-miR-151a-3p, hsa-miR-3200-5p, hsa-miR-1537-3p, hsa-miR-500a-5p, hsa-miR-127-3p, hsa-miR-570-3p, hsa-miR-130b-5p, hsa-miR-503-5p, hsa-miR-551a, hsa-miR-409-3p, hsa-miR-330-3p, hsa-miR-889-3p, hsa-miR-625-5p, hsa-miR-542-3p, hsa-miR-582-3p, hsa-miR-381-3p, hsa-miR-495-3p, hsa-miR-103a-1-5p, hsa-miR-450b-5p, hsa-miR-429, hsa-miR-576-5p, hsa-miR-148b-3p, hsa-miR-320c, hsa-miR-4286, hsa-miR-126-3p, hsa-miR-152-3p, hsa-miR-144-3p, hsa-miR-195-5p, hsa-let-7a-5p, hsa-miR-378f, hsa-miR-126-5p, hsa-miR-26a-5p, hsa-miR-29a-3p, hsa-miR-181a-5p, hsa-miR-32-5p, hsa-miR-142-3p, hsa-miR-29c-3p, hsa-miR-424-5p, hsa-miR-192-5p, hsa-miR-143-3p, hsa-miR-30c-5p, hsa-miR-146a-5p, hsa-miR-101-3p, hsa-miR-19b-3p, hsa-miR-33b-5p, hsa-miR-378a-3p, hsa-miR-22-3p, hsa-miR-107, hsa-miR-497-5p, hsa-miR-15a-3p, hsa-miR-188-5p, hsa-let-7d-3p, hsa-miR-132-3p, hsa-miR-151a-5p, hsa-miR-194-5p, hsa-miR-99a-5p, hsa-miR-125b-5p, hsa-miR-25-3p, hsa-miR-103a-3p, hsa-miR-1285-3p, hsa-miR-7977, hsa-miR-30b-5p, hsa-miR-363-3p, hsa-miR-93-5p, hsa-miR-375-3p, hsa-miR-99b-5p, hsa-miR-193b-3p, hsa-miR-324-3p, hsa-miR-193a-3p, hsa-miR-342-3p, hsa-miR-484, hsa-miR-532-3p, hsa-miR-210-3p, hsa-miR-2110, hsa-miR-296-5p, hsa-miR-1307-5p, hsa-miR-19a-3p, hsa-miR-139-5p, hsa-miR-3665, hsa-miR-RG-84, hsa-miR-4454, and hsa-let-7b-5p; and according to the order of the miRNAs, nucleotide sequences of 5′-terminus amplification primers designed correspondingly are shown in SEQ ID NO: 1 to SEQ ID NO: 97, respectively.

[0059] In the present disclosure, the primer set preferably further includes a transition primer and a reverse primer for amplifying the isomiR; a nucleotide sequence of the transition primer is shown in SEQ ID NO: 99 (TCTACAGATCCTGGCCTCTGACTCCAGGATCTGTAGAC

[0060] CTCCATCCGAGACACACGAT); and a nucleotide sequence of the reverse primer for amplifying the isomiR is shown in SEQ ID NO: 100 (GTTTGTTGCTACGCTCAGAATCCTAAGCGTAGCAACAAACATAGACTCCTCGCATAGCC TCATGAGTC).

[0061] In the present disclosure, the primer set preferably further includes a 5′ universal primer and a 3′ universal primer. A nucleotide sequence of the 5′ universal primer is shown in SEQ ID NO: 101 (CAGAATCCTAAGCGTAGCAACAAAC); and a nucleotide sequence of the 3′ universal primer is shown in SEQ ID NO: 102 (GCCTCTGACTCCAGGATCTGTAGAC).

[0062] The present disclosure has no special restrictions on sources of the primers, and the primers can be synthesized by a gene synthesis method well known in the art.

[0063] The present disclosure provides a method for amplifying an isomiR, including the following steps:
[0064] total RNA is extracted from each of a gastric cancer sample and a non-gastric cancer sample, and reverse-transcribed into cDNA;
[0065] with the cDNA as a template, a first PCR preamplification is conducted using the primer set described above to obtain a first preamplification product;
[0066] with the first preamplification product as a template, a second PCR preamplification is conducted using the transition primer and the reverse primer for amplifying the isomiR in the primer set described above to obtain a second preamplification product; and
[0067] with the second preamplification product as a template, a third PCR preamplification is conducted using the 5′ universal primer and the 3′ universal primer in the primer set described above to obtain a third preamplification product, which is the isomiR.

[0068] In the present disclosure, total RNA is extracted from each of a gastric cancer sample and a non-gastric cancer sample, and reverse-transcribed into cDNA.

[0069] The present disclosure has no special restrictions on a method for extracting the total RNA, and a method for extracting total RNA well known in the art may be adopted. For example, a commercial kit method can be used to extract the total RNA.

[0070] In the present disclosure, the reverse-transcription includes a PolyA reaction, a denaturation reaction, and a reverse-transcription reaction. A system for the PolyA reaction is preferably of 20 μL, and includes the following reagents: 5× reverse-transcription buffer: 4 μL, 10 mM ATP: 2 μL, 5,000 U/μl PolyA enzyme: 1 μL, 40,000 U/μl RNA Inhibitor: 0.5 μL, and RNA sample: 12.5 μL. The PolyA reaction is preferably conducted at 37° C. for 30 min and then at 65° C. for 20 min. A system for the denaturation reaction is preferably of 20 μL, and includes the following reagents: 10 mM dNTPs: 1.5 μL, 10 μM reverse-transcription primer (USRTPn): 1.5 μL, and Poly A reaction product: 17 μL. The reverse-transcription primer is preferably USRTPn with a corresponding nucleotide sequence shown in SEQ ID NO: 2063 (CCTCCATCCGAGACACACGATTGATGGTTTTTTTTTTTTTTTTTTVN). The denaturation reaction is preferably conducted as follows: the system for the denaturation reaction is heated at 65° C. for 5 min, then taken out 1 s before the end of the heating, and then immediately incubated in an ice bath for 1 min. A system for the reverse-transcription reaction is preferably of 30 μL, and includes the following reagents: 5× reverse-transcription buffer: 2 μL, 1.6 M trehalose: 4.5 μL, 1 mg/μL Actinomycin D: 1.2 μL, T4gp32/RecA/ATP mixed solution: 1.5 μL, 40,000 U/μL RNA Inhibitor: 0.3 μL, 50 U/μL Maxima H reverse transcriptase: 1.5 μL, and denaturation reaction product: 19 μL. Based on one sample, the T4gp32/RecA/ATP mixed solution is preferably prepared from the following reagents: 10 μg/μL T4gp32: 0.6 μL, 2 μg/μL Tth RecA: 0.2 μL, 100 mM ATP: 0.24 μL, and 1× reverse-transcription buffer: 1.96 μL. The reverse-transcription reaction is preferably conducted at 42° C. for 15 min, 50° C. for 30 min. 55° C. for 30 min, 60° C. for 30 min, 65° C. for 30 min, and then 85° C. for 5 min.

[0071] In the present disclosure, after the cDNA is obtained, with the cDNA as a template, a first PCR preamplification is conducted using the primer set described above to obtain a first preamplification product.

[0072] In the present disclosure, a reaction system for the first PCR preamplification is preferably of 20 μL, and includes the following reagents: 2× Boost mix: 10 μL, 0.2 μg/μl Tth RecA: 1 μL, 1 μM primer set: 1.5 μL, and cDNA: 7.5 μL. A composition and a preparation method of 2× Boost mix can specifically refer to a specific quantitative PCR reaction mixed solution in Example 1 recorded in the patent ZL 201910219827.4 “Specific Quantitative PCR Mixed Solution, miRNA Quantitative Detection Kit, and Detection Method”, but the 2× Boost mix (including UDG) is prepared with a dNTP mixed solution without dUTP. A reaction procedure for the first PCR preamplification is preferably as follows: (1) 25° C. for 10 min; (2) 95° C. for 10 min; (3) 3 cycles of (95° C. for 10 s and 55° C. for 10 min); (4) 3 cycles of (95° C. for 10 s and 50° C. for 10 min); (5) 2 cycles of (95° C. for 10 s and 45° C. for 10 min); (6) 2 cycles of (95° C. for 10 s and 40° C. for 10 min); (7) 2 cycles of (95° C. for 10 s and 37° C. for 10 min); (8) 1 cycle of (95° C. for 10 s, 60° C. for 2 min, and 72° C. for 10 min); and (9) a PCR tube is incubated at 72° C. for 5 min, and then taken out and immediately incubated in an ice bath. The first PCR preamplification facilitates the amplification of a large number of isomiRs from reverse-transcription products. The first preamplification product is purified and then treated with an EXO I enzyme to remove PCR primers from the system.

[0073] In the present disclosure, after the first preamplification product is obtained, with the first preamplification product as a template, a second PCR preamplification is conducted using the transition primer and the reverse primer for amplifying the isomiR in the primer set described above to obtain a second preamplification product.

[0074] In the present disclosure, a reaction system for the second PCR preamplification is preferably of 20 μL, and includes the following reagents: 2× Boost mix: 10 μL, 10 μm transition primer (USEXPnb): 1 μL, 10 μm isomiR primer: 1 μL, 0.2 μg/μL Tth RecA: 1 μL, and first preamplification product: 7 μL. A reaction procedure for the second PCR preamplification is preferably as follows: (1) 25° C. for 10 min; (2) 95° C. for 10 min; (3) 3 cycles of (95° C. for 10 s and 65° C. for 10 min); (4) 3 cycles of (95° C. for 10 s and 62° C. for 10 min); (5) 2 cycles of (95° C. for 10 s and 58° C. for 2 min); (6) 2 cycles of (95° C. for 10 s and 60° C. for 2 min); (7) 1 cycle of (95° C. for 10 s, 60° C. for 2 min, and 72° C. for 10 min); and (8) a PCR tube is incubated at 72° C. for 5 min, and then taken out and incubated in an ice bath. The second preamplification product is preferably purified with magnetic beads. The second PCR pre-amplification is conducted with the transition primer and the reverse primer for amplifying the isomiR, and is intended to introduce binding sites for the 3′ universal primer and the 5′ universal primer.

[0075] With the second preamplification product as a template, a third PCR preamplification is conducted using the 5′ universal primer and the 3′ universal primer in the primer set described above to obtain a third preamplification product, which is the isomiR.

[0076] In the present disclosure, a reaction system for the third PCR preamplification is preferably of 20 μL, and includes the following reagents: 2× Boost mix: 10 μL, 10 μm URP: 1 μL, 10 μm UFP: 1 μL, 0.2 μg/μL Tth RecA: 1 μL, and second preamplification product: 7 μL. A reaction procedure for the third PCR preamplification is preferably as follows: (1) 95° C. for 10 min; (2) 12 cycles of (95° C. for 10 s and 65° C. for 1 min); (4) 72° C. for 10 min; and (5) 72° C. for 5 min and then incubation in an ice bath. The third preamplification product is purified and then treated with an EXO I enzyme to remove PCR primers.

[0077] In the present disclosure, after the third preamplification product is obtained, qPCR amplification is conducted preferably with the third preamplification product as a template to obtain an expression level of the isomiR as a part of quality control. A forward primer for the qPCR amplification is preferably a 5′ universal primer. A reverse primer for the qPCR amplification is preferably a 3′ universal primer. A probe for the qPCR amplification is preferably an LNAFAM probe, and a corresponding nucleotide sequence of the probe is shown in SEQ ID NO: 2064 (ACC+AT+CA+AT+CG+TG+TG, where + represents a locked nucleic acid (LNA)). A reaction system for the qPCR amplification is preferably of 10 μL, and preferably includes the following reagents: fold-diluted third preamplification product: 0.08 μL, 2× DNA polymerase mixture: 5 μL, forward primer with a final concentration of 0.2 μM, reverse primer with a final concentration of 0.2 μM, probe with a final concentration of 0.2 μM, and ddH₂O: making up to 10 μL. A reaction procedure for the qPCR amplification is preferably as follows: 95° C. for 10 min, 95° C. for 30 s, and 65° C. for 1 min, with 40 cycles.

[0078] The present disclosure provides a double unique dual indexing amplification primer set for construction of a high-throughput sample library for NGS, including primers for adding an inner DUDI and primers for adding an outer DUDI and a sequencing adapter, where a forward primer among the primers for adding an inner DUDI is obtained by linking a DNA fragment shown in SEQ ID NO: 2055 (CACGACGCTCTTCCGATCT), an I5 Index sequence, and a DNA fragment shown in SEQ ID NO: 2056 (CAAACATAGACTCCTCGCATAGCCT) sequentially; a reverse primer among the primers for adding an inner DUDI is obtained by linking a DNA fragment shown in SEQ ID NO: 2057 (CTCGGAGATGTGTATAAGAGACAG), an I7 Index sequence, and a DNA fragment shown in SEQ ID NO: 2058 (ACCTCCATCCGAGACACACG) sequentially; a forward primer among the primers for adding an outer DUDI and a sequencing adapter is obtained by linking a DNA fragment shown in SEQ ID NO: 2059 (AATGATACGGCGACCACCGAGATCTACAC), the I5 Index sequence, and a DNA fragment shown in SEQ ID NO: 2060 (ACACTCTTTCCCTACACGACGCTCTTCCGATCT) sequentially; a reverse primer among the primers for adding an outer DUDI and a sequencing adapter is obtained by linking a DNA fragment shown in SEQ ID NO: 2061 (CTGTCTCTTATACACATCTCCGAGCCCACGAGAC), the I7 Index sequence, and a DNA fragment shown in SEQ ID NO: 2062 (CTCGGAGATGTGTATAAGAGACAG) sequentially; a nucleotide sequence of the I5 Index sequence is one selected from the group consisting of SEQ ID NO: 103 to SEQ ID NO: 1078; and a nucleotide sequence of the I7 Index sequence is one selected from the group consisting of SEQ ID NO: 1079 to SEQ ID NO: 2054.

[0079] In the present disclosure, the I5 Index sequence and the I7 Index sequence are combined into a set. The I5 Index sequence and the I7 Index sequence are preferably screened out as follows: 10 base-unique short sequences are randomly produced, complementary sequences are removed, and then DUDI is screened out preferably according to the following criteria: a same base should not be repeated three or more times; a sequence is not seriously complementary to other sequences; a sequence is at least 3 bases different from other sequences; after two sequences of a same DUDI bind to surrounding sequences, the specific amplification of the primer is not affected, that is, the possibility of producing a primer dimer is not increased; and a score of pairing between two sequences is calculated, and a pair with a minimum score (namely, maximum specificity) is selected as a set indexes for indexing forward and reverse primers. A total of 976 pairs of DUDIs are screened out for indexing high-throughput samples of NGS. Because sequences of different DUDIs are at least 3 bases different from each other, these indexes can still maintain their uniqueness and will not become other unique dual indexes even if there is a sequencing error and one base mismatch is allowed. Thus, the indexing has a very high accuracy. In terms of this advantage, the method of the present disclosure is also very superior to the conventional method. Because a large number of sequences need to be indexed in the conventional method, for example, 2,000 sequences need to be indexed for 1,000 samples, a probability of false indexing of the conventional method is at least 5 times a probability of false indexing of the method of the present disclosure. In the present disclosure, a large number of samples are analyzed through experiments, and more than 400 G of data are acquired, but there is no mismatched NGS read.

[0080] The present disclosure provides a kit for construction of a high-throughput sample library for NGS, including the primer set for amplification of an isomiR described above, the double unique dual indexing amplification primer set described above, and 2× boost mix, where the 2× Boost mix includes the following components: water as a solvent, Tris-HCl: 70 mmol/L to 80 mmol/L, (NH₄)₂SO₄: 15 mmol/L to 25 mmol/L, Triton-100: 0.08% to 0.12% in a volume concentration, MgCl₂: 2 mmol/L to 3 mmol/L, dNTPs: 150 μmol/L to 250 μmol/L, trehalose: 190 mmol/L to 210 mmol/L, and hot-start Taq DNA polymerase: 45,000 U/L to 55,000 U/L; a pH of the Tris-HCl is 8.5 to 9.0; and the dNTPs refers to a dNTP mixed solution that includes UDG and does not include dUTP.

[0081] The present disclosure provides a method for construction of a high-throughput sample library for NGS, including the following step:
[0082] with the third preamplification product obtained by the method described above as a template, a first PCR amplification is conducted using the primers for adding an inner DUDI in the double unique dual indexing amplification primer set described above to obtain an IUDI-containing PCR product;
[0083] with the IUDI-containing PCR product as a template, a second PCR amplification is conducted using the primers for adding an outer DUDI and a sequencing adapter in the double unique dual indexing amplification primer set described above to obtain a DUDI-containing PCR product; and pooling is conducted to obtain a sequencing library.

[0084] In the present disclosure, a reaction system for the first PCR amplification is preferably of 30 μL, and includes the following reagents: 2× PCR enzyme (including UDG and UTP): 15 μL, 10 μM each of forward and reverse primers for adding an inner DUDI: 0.5 μL, third preamplification product: 2 μL, and water: the balance. A reaction procedure for the first PCR amplification is preferably as follows: (1) 95° C. for 10 min: (2) 3 cycles of (95° C. for 15 s, 62° C. for 30 s, and 72° C. for 1 min); (3) 2 cycles of (95° C. for 15 s, 64° C. for 30 s, and 72° C. for 1 min); (4) 11 cycles of (95° C. for 15 s, 68° C. for 30 s, and 72° C. for 1 min); (5) 1 cycle of (95° C. for 15 s and 72° C. for 20 min); and (6) incubation at 72° C. for 18 min and then in an ice bath.

[0085] In the present disclosure, a reaction system for the second PCR amplification is preferably of 30 μL, and includes the following reagents: 2× PCR enzyme (including UDG and UTP): 15 μL, 10 μM each of forward and reverse primers for adding an inner DUDI: 0.5 μL, third preamplification product: 2 μL, and water: the balance. A reaction procedure for the second PCR amplification is preferably as follows: (1) 95° C. for 10 min; (2) 3 cycles of (95° C. for 15 s, 62° C. for 30 s, and 72° C. for 1 min); (3) 2 cycles of (95° C. for 15 s, 64° C. for 30 s, and 72° C. for 1 min); (4) 11 cycles of (95° C. for 15 s, 68° C. for 30 s, and 72° C. for 1 min); (5) 1 cycle of (95° C. for 15 s and 72° C. for 20 min); and (6) incubation at 72° C. for 18 min and then in an ice bath.

[0086] In the present disclosure, the method for construction of a high-throughput sample library for NGS preferably further includes: a pooled DUDI-containing PCR product is precipitated and treated with an ExoI enzyme to remove PCR primers to obtain the sequencing library. The removal of PCR primers refers to the removal of double unique dual indexing amplification primers including forward and reverse primers that do not react during the above PCR processes. The removal of PCR primers is intended to prevent downstream sequencing reactions of the PCR primers.

[0087] In the present disclosure, the DUDI-containing PCR product is obtained based on the double unique dual indexing technology for multiplex NGS developed in the present disclosure. In the double unique dual indexing technology for multiplex NGS, with cDNA as a template, an IUDI is added to each of two termini of the cDNA through PCR, and then an OUDI and a sequencing adapter are added to each of two termini of a PCR product obtained previously through PCR amplification to obtain a DUDI-carried PCR product; and DUDI-carried PCR products are pooled and subjected to PCR primer removal to obtain an amplification library for NGS analysis. After NGS is completed, original NGS data are split into a number of samples corresponding to the sample pooling according to DUDI sequences, and isomiRs are identified and quantified by removing irrelevant sequences.

[0088] The present disclosure provides a use of the primer set for amplification of an isomiR described above, an isomiR amplified by the method described above, or the double unique dual indexing amplification primer set described above in construction of a prediction model for artificial intelligent diagnosis of a tumor based on NGS.

[0089] In the present disclosure, the tumor preferably includes gastric cancer. In the present disclosure, it is determined by optimizing a classifier that a machine learning model for auxiliary diagnosis of gastric cancer is established with a support vector machine (SVM) algorithm. Preferably, parameters of the SVM algorithm are optimized through grid search, and numerical ranges of the parameters are as follows: gamma=2⁽⁻⁸⁻¹⁾ and cost=2⁽⁰⁻⁴⁾. A prediction model is validated through 10-fold cross-validation. Once a prediction model is obtained, the prediction model is further preferably evaluated. Criteria for the evaluation include accuracy and Kappa. Accuracy, Kappa, and other evaluation indexes are preferably described by a confusion matrix and a receiver operating characteristic (ROC) curve.

[0090] In an embodiment of the present disclosure, a prediction model for artificial intelligent diagnosis of a tumor based on NGS is constructed based on an optimized SVM algorithm and optimized parameters thereof with sequencing results obtained through comprehensive amplification of gastric cancer-associated isomiRs, library construction, and NGS as data. In the experiments of the present disclosure, the sequencing of a same sample is repeated three or more times, and sequencing data of different batches are used to build a model for predicting sequencing data of other batches. Sequencing results of the three or more times show high repeatability, indicating that NGS data based on isomiRs of high-throughput samples can be used in construction of a machine learning prediction model to allow the artificial intelligent auxiliary diagnosis of a tumor.

[0091] The reproducible double unique dual indexing library construction method for NGS of an isomiR and the use thereof provided by the present disclosure are described in detail below with reference to examples, but these examples may not be understood as a limitation to the protection scope of the present disclosure.

[0092] EXAMPLE 1

### An NGS Library Construction Method for isomiRs Derived from Gastric Cancer Samples

### I. Extraction of Sample RNA and Reverse Transcription and Preamplification of IsomiRs

### 1. Extraction of Sample RNA

[0093] Sample source description: Gastric cancer samples (300) and non-gastric cancer clinical samples (300) were collected from the Cancer Hospital Chinese Academy of Medical Sciences, the Beijing Cancer Hospital, the Second People's Hospital of Dongying, and the PKUCare Luzhong Hospital.

[0094] An RNA extraction kit (purchased from Thermo Fisher) was used to extract RNA from each of the gastric cancer samples and non-gastric cancer clinical samples, and specific operations were completed according to instructions of the RNA extraction kit. After RNA of each sample was extracted, total RNA with a qualified concentration and quality determined by a nucleic acid quantification detector was stored at −20° C. for later use.

### 2. Reverse-Transcription and Preamplification of isomiRs in Gastric Cancer Samples

### A. Poly A Reaction

[0095] For one sample, a 20 μL reaction system was prepared specifically from the following reagents: 5× reverse-transcription buffer: 4 μL, ATP (10 mM): 2 μL, PolyA enzyme (5,000 U/μL): 1 μL, RNA Inhibitor (40,000 U/μL): 0.5 μL, and total RNA: 12.5 μL.

[0096] The prepared reaction system was subjected to the PolyA reaction at 37° C. for 30 min and then at 65° C. for 20 min. A resulting reaction system was sealed with a film and then stored at −5° C. (for thermal inactivation).

[0097] Notes: a. When there are a plurality of samples, a total system is prepared first and then dispensed into each PCR tube, and then an RNA sample is added to each PCR tube. b. Each tube is labeled first, and then an RNA sample is added according to a label of a tube, where the label should be checked to determine whether the label is consistent with the sample.

### B. Reverse-Transcription Reaction

[0098] For a sample, a 20 μL reaction system was prepared specifically from the following reagents: 10 mM dNTPs: 1.5 μL, 10 μM reverse-transcription primer (USRTPn, CCTCCATCCGAGACACACGATTGATGGTTTTTTTTTTTTTTTTTTVN, SEQ ID NO: 2063): 1.5 μL, and Poly A template: 17 μL.

[0099] The prepared reaction system was heated at 65° C. for 5 min to allow a denaturation reaction, then taken out 1 s before the end of the heating and immediately incubated in an ice bath for 1 min, and then centrifuged.

[0100] *Notes: 1. The dNTPs here do not include dUTP, otherwise a reverse-transcription product of cDNA will be degraded.

[0101] 2. A Master Mix method is always used to avoid a sampling quantity of less than or equal to 1 μL, the same below.

[0102] 3. The USEXPnb and the IsomiRupb primer below need to be purified with magnetic beads.

[0103] For a sample, a 30 μL reaction system for the reverse-transcription reaction was prepared specifically from the following reagents: 5× reverse-transcription buffer: 2 μL, 1.6 M trehalose: 4.5 μL, Actinomycin D (1 mg/μL): 1.2 μL, T4gp32/RecA/ATP mixed solution: 1.5 μL, RNA Inhibitor (40,000 U/μL): 0.3 μL, Maxima H reverse transcriptase (50 U/μL): 1.5 μL, and denaturation reaction product: 19 μL.

[0104] For a sample, the T4gp32/RecA/ATP mixed solution was prepared from the following reagents: T4gp32 (10 μg/μL): 0.6 μL, Tth RecA (2 μg/μL): 0.2 μL, ATP (100 mM): 0.24 μL, and 1× reverse-transcription buffer: 1.96 μL.

[0105] The prepared reaction system was subjected to the reverse-transcription reaction at 42° C. for 15 min, 50° C. for 30 min, 55° C. for 30 min, 60° C. for 30 min, 65° C. for 30 min, and 85° C. for 5 min.

### C. Preamplification

### First PCR Preamplification

[0106] 1. For a sample, a 20 μL reaction system for the first PCR preamplification was prepared from the following reagents: 2× Boost mix*: 10 μL, Tth RecA (0.2 μg/μL)**: 1 μL, Pre-IsomiR mix* (1 μM): 1.5 μL, and reverse-transcription product: 7.5 μL.

[0107] The 2× Boost mix* (including UDG) was prepared with a dNTP mixed solution without dUTP. The 2× Boost mix could specifically refer to a specific quantitative PCR reaction mixed solution in Example 1 of the patent ZL 201910219827.4 “Specific Quantitative PCR Mixed Solution, miRNA Quantitative Detection Kit, and Detection Method”.

[0108] Pre-IsomiR mix* (1 μM): 10 μL of each of 97 primers (a concentration of a primer stock solution was 100 μM, and specific sequences could be seen in Table 1) was taken, and then 20 μL of H₂O (Nuclease-Free) was added to prepare a primer mix with a final concentration of 1 μm (1,000 μL).

TABLE 1
5′-terminus amplification primers for isomiRs

| | | |
|---|---|---|
| hsa-miR-21-5p | ATAGACTCCTCGCATAGCCTCATGAGTCTAGCTTATCAGAC | SEQ ID NO: 1 |
| hsa-miR-223-3p | ATAGACTCCTCGCATAGCCTCATGAGTCTGTCAGTTTGTC | SEQ ID NO: 2 |
| hsa-miR-223-5p | ATAGACTCCTCGCATAGCCTCATGAGTCCGTGTATTTGAC | SEQ ID NO: 3 |
| hsa-miR-186-5p | ATAGACTCCTCGCATAGCCTCATGAGTCCAAAGAATTCTCC | SEQ ID NO: 4 |
| hsa-miR-18a-5p | ATAGACTCCTCGCATAGCCTCATGAGTCTAAGGTGCATCT | SEQ ID NO: 5 |
| hsa-miR-146b-5p | ATAGACTCCTCGCATAGCCTCATGAGTCTGAGAACTGAATTC | SEQ ID NO: 6 |
| hsa-miR-624-5p | ATAGACTCCTCGCATAGCCTCATGAGTCTAGTACCAGTACC | SEQ ID NO: 7 |
| hsa-miR-106b-5p | ATAGACTCCTCGCATAGCCTCATGAGTCTAAAGTGCTGAC | SEQ ID NO: 8 |
| hsa-miR-340-5p | ATAGACTCCTCGCATAGCCTCATGAGTCTTATAAAGCAATGAG | SEQ ID NO: 9 |
| hsa-miR-20a-5p | ATAGACTCCTCGCATAGCCTCATGAGTCTAAAGTGCTTATAG | SEQ ID NO: 10 |
| hsa-miR-45la | ATAGACTCCTCGCATAGCCTCATGAGTCTGCCCTGAGAC | SEQ ID NO: 11 |
| hsa-miR-7976 | ATAGACTCCTCGCATAGCCTCATGAGTCATTGTCCTTGC | SEQ ID NO: 12 |
| hsa-miR-2355-3p | ATAGACTCCTCGCATAGCCTCATGAGTCCAGTGCAATAGT | SEQ ID NO: 13 |
| hsa-miR-301a-3p | ATAGACTCCTCGCATAGCCTCATGAGTCGGATATCATCATATAC | SEQ ID NO: 14 |
| hsa-miR-144-5p | ATAGACTCCTCGCATAGCCTCATGAGTCCTAGACTGAAGC | SEQ ID NO: 15 |
| hsa-miR-151a-3p | ATAGACTCCTCGCATAGCCTCATGAGTCAATCTGAGAAGGC | SEQ ID NO: 16 |
| hsa-miR-3200-5p | ATAGACTCCTCGCATAGCCTCATGAGTCAAAACCGTCTAGT | SEQ ID NO: 17 |
| hsa-miR-1537-3p | ATAGACTCCTCGCATAGCCTCATGAGTCTAATCCTTGCTAC | SEQ ID NO: 18 |
| hsa-miR-500a-5p | ATAGACTCCTCGCATAGCCTCATGAGTCTCGGATCCGT | SEQ ID NO: 19 |
| hsa-miR-127-3p | ATAGACTCCTCGCATAGCCTCATGAGTCCGAAAACAGCAAT | SEQ ID NO: 20 |
| hsa-miR-570-3p | ATAGACTCCTCGCATAGCCTCATGAGTCACTCTTTCCCTG | SEQ ID NO: 21 |
| hsa-miR-130b-5p | ATAGACTCCTCGCATAGCCTCATGAGTCTAGCAGCGGG | SEQ ID NO: 22 |
| hsa-miR-503-5p | ATAGACTCCTCGCATAGCCTCATGAGTCGCGACCCAC | SEQ ID NO: 23 |
| hsa-miR-55la | ATAGACTCCTCGCATAGCCTCATGAGTCGAATGTTGCTCG | SEQ ID NO: 24 |
| hsa-miR-409-3p | ATAGACTCCTCGCATAGCCTCATGAGTCGCAAAGCACAC | SEQ ID NO: 25 |
| hsa-miR-330-3p | ATAGACTCCTCGCATAGCCTCATGAGTCTTAATATCGGACAAC | SEQ ID NO: 26 |
| hsa-miR-889-3p | ATAGACTCCTCGCATAGCCTCATGAGTCAGGGGGAAAGT | SEQ ID NO: 27 |
| hsa-miR-625-5p | ATAGACTCCTCGCATAGCCTCATGAGTCTGTGACAGATTG | SEQ ID NO: 28 |
| hsa-miR-542-3p | ATAGACTCCTCGCATAGCCTCATGAGTCTAACTGGTTGAACAAC | SEQ ID NO: 29 |
| hsa-miR-582-3p | ATAGACTCCTCGCATAGCCTCATGAGTCTATACAAGGGCAAG | SEQ ID NO: 30 |
| hsa-miR-381-3p | ATAGACTCCTCGCATAGCCTCATGAGTCAAACAAACATGG | SEQ ID NO: 31 |
| hsa-miR-495-3p | ATAGACTCCTCGCATAGCCTCATGAGTCGGCTTCTTTACAG | SEQ ID NO: 32 |
| hsa-miR-103a-1-5p | ATAGACTCCTCGCATAGCCTCATGAGTCTTTTGCAATATGT | SEQ ID NO: 33 |
| hsa-miR-450b-5p | ATAGACTCCTCGCATAGCCTCATGAGTCTAATACTGTCTGG | SEQ ID NO: 34 |
| hsa-miR-429 | ATAGACTCCTCGCATAGCCTCATGAGTCATTCTAATTTCTCC | SEQ ID NO: 35 |
| hsa-miR-576-5p | ATAGACTCCTCGCATAGCCTCATGAGTCTCAGTGCATCAC | SEQ ID NO: 36 |
| hsa-miR-148b-3p | ATAGACTCCTCGCATAGCCTCATGAGTCAAAAGCTGGGT | SEQ ID NO: 37 |
| hsa-miR-320c | ATAGACTCCTCGCATAGCCTCATGAGTCACCCCACTCC | SEQ ID NO: 38 |
| hsa-miR-4286 | ATAGACTCCTCGCATAGCCTCATGAGTCTCGTACCGTG | SEQ ID NO: 39 |
| hsa-miR-126-3p | ATAGACTCCTCGCATAGCCTCATGAGTCTCAGTGCATGAC | SEQ ID NO: 40 |
| hsa-miR-152-3p | ATAGACTCCTCGCATAGCCTCATGAGTCTACAGTATAGATGAT | SEQ ID NO: 41 |
| hsa-miR-144-3p | ATAGACTCCTCGCATAGCCTCATGAGTCTAGCAGCACAG | SEQ ID NO: 42 |
| hsa-miR-195-5p | ATAGACTCCTCGCATAGCCTCATGAGTCTGAGGTAGTAGG | SEQ ID NO: 43 |
| hsa-let-7a-5p | ATAGACTCCTCGCATAGCCTCATGAGTCACTGGACTTGG | SEQ ID NO: 44 |
| hsa-miR-378f | ATAGACTCCTCGCATAGCCTCATGAGTCCATTATTACTTTTGG | SEQ ID NO: 45 |
| hsa-miR-126-5p | ATAGACTCCTCGCATAGCCTCATGAGTCTTCAAGTAATCCAG | SEQ ID NO: 46 |
| hsa-miR-26a-5p | ATAGACTCCTCGCATAGCCTCATGAGTCTAGCACCATCTG | SEQ ID NO: 47 |
| hsa-miR-29a-3p | ATAGACTCCTCGCATAGCCTCATGAGTCAACATTCAACGC | SEQ ID NO: 48 |
| hsa-miR-181a-5p | ATAGACTCCTCGCATAGCCTCATGAGTCTATTGCACATTAC | SEQ ID NO: 49 |
| hsa-miR-32-5p | ATAGACTCCTCGCATAGCCTCATGAGTCTGTAGTGTTTCC | SEQ ID NO: 50 |
| hsa-miR-142-3p | ATAGACTCCTCGCATAGCCTCATGAGTCTAGCACCATTTG | SEQ ID NO: 51 |
| hsa-miR-29c-3p | ATAGACTCCTCGCATAGCCTCATGAGTCCAGCAGCAATTC | SEQ ID NO: 52 |
| hsa-miR-424-5p | ATAGACTCCTCGCATAGCCTCATGAGTCCTGACCTATGAAT | SEQ ID NO: 53 |
| hsa-miR-192-5p | ATAGACTCCTCGCATAGCCTCATGAGTCTGAGATGAAGCAC | SEQ ID NO: 54 |
| hsa-miR-143-3p | ATAGACTCCTCGCATAGCCTCATGAGTCTGTAAACATCCTA | SEQ ID NO: 55 |
| hsa-miR-30c-5p | ATAGACTCCTCGCATAGCCTCATGAGTCTGAGAACTGAATTC | SEQ ID NO: 56 |
| hsa-miR-146a-5p | ATAGACTCCTCGCATAGCCTCATGAGTCTACAGTACTGTGAT | SEQ ID NO: 57 |
| hsa-miR-101-3p | ATAGACTCCTCGCATAGCCTCATGAGTCTGTGCAAATCC | SEQ ID NO: 58 |
| hsa-miR-19b-3p | ATAGACTCCTCGCATAGCCTCATGAGTCGTGCATTGCTG | SEQ ID NO: 59 |
| hsa-miR-33b-5p | ATAGACTCCTCGCATAGCCTCATGAGTCACTGGACTTGG | SEQ ID NO: 60 |
| hsa-miR-378a-3p | ATAGACTCCTCGCATAGCCTCATGAGTCAAGCTGCCAGT | SEQ ID NO: 61 |
| hsa-miR-22-3p | ATAGACTCCTCGCATAGCCTCATGAGTCAGCAGCATTGT | SEQ ID NO: 62 |
| hsa-miR-107 | ATAGACTCCTCGCATAGCCTCATGAGTCCAGCAGCAC | SEQ ID NO: 63 |
| hsa-miR-497-5p | ATAGACTCCTCGCATAGCCTCATGAGTCCAGGCCATATTG | SEQ ID NO: 64 |
| hsa-miR-15a-3p | ATAGACTCCTCGCATAGCCTCATGAGTCCATCCCTTGCAT | SEQ ID NO: 65 |
| hsa-miR-188-5p | ATAGACTCCTCGCATAGCCTCATGAGTCCTATACGACCTG | SEQ ID NO: 66 |
| hsa-let-7d-3p | ATAGACTCCTCGCATAGCCTCATGAGTCTAACAGTCTACAG | SEQ ID NO: 67 |
| hsa-miR-132-3p | ATAGACTCCTCGCATAGCCTCATGAGTCTCGAGGAGCTC | SEQ ID NO: 68 |
| hsa-miR-151a-5p | ATAGACTCCTCGCATAGCCTCATGAGTCTGTAACAGCAAC | SEQ ID NO: 69 |
| hsa-miR-194-5p | ATAGACTCCTCGCATAGCCTCATGAGTCAACCCGTAGATCC | SEQ ID NO: 70 |
| hsa-miR-99a-5p | ATAGACTCCTCGCATAGCCTCATGAGTCTCCCTGAGACC | SEQ ID NO: 71 |
| hsa-miR-125b-5p | ATAGACTCCTCGCATAGCCTCATGAGTCCATTGCACTTGT | SEQ ID NO: 72 |
| hsa-miR-25-3p | ATAGACTCCTCGCATAGCCTCATGAGTCAGCAGCATTGT | SEQ ID NO: 73 |
| hsa-miR-103a-3p | ATAGACTCCTCGCATAGCCTCATGAGTCTCTGGGCAAC | SEQ ID NO: 74 |
| hsa-miR-1285-3p | ATAGACTCCTCGCATAGCCTCATGAGTCTTCCCAGCC | SEQ ID NO: 75 |
| hsa-miR-7977 | ATAGACTCCTCGCATAGCCTCATGAGTCTGTAAACATCCTA | SEQ ID NO: 76 |
| hsa-miR-30b-5p | ATAGACTCCTCGCATAGCCTCATGAGTCAATTGCACGGT | SEQ ID NO: 77 |
| hsa-miR-363-3p | ATAGACTCCTCGCATAGCCTCATGAGTCCAAAGTGCTGT | SEQ ID NO: 78 |
| hsa-miR-93-5p | ATAGACTCCTCGCATAGCCTCATGAGTCTTTGTTCGTTCG | SEQ ID NO: 79 |
| hsa-miR-375-3p | ATAGACTCCTCGCATAGCCTCATGAGTCCACCCGTAGAA | SEQ ID NO: 80 |
| hsa-miR-99b-5p | ATAGACTCCTCGCATAGCCTCATGAGTCAACTGGCCCT | SEQ ID NO: 81 |
| hsa-miR-193b-3p | ATAGACTCCTCGCATAGCCTCATGAGTCACTGCCCCA | SEQ ID NO: 82 |
| hsa-miR-324-3p | ATAGACTCCTCGCATAGCCTCATGAGTCAACTGGCCTAC | SEQ ID NO: 83 |
| hsa-miR-193a-3p | ATAGACTCCTCGCATAGCCTCATGAGTCTCTCACACAG | SEQ ID NO: 84 |
| hsa-miR-342-3p | ATAGACTCCTCGCATAGCCTCATGAGTCTCAGGCTCAGT | SEQ ID NO: 85 |
| hsa-miR-484 | ATAGACTCCTCGCATAGCCTCATGAGTCCCTCCCACAC | SEQ ID NO: 86 |
| hsa-miR-532-3p | ATAGACTCCTCGCATAGCCTCATGAGTCCTGTGCGTGT | SEQ ID NO: 87 |
| hsa-miR-210-3p | ATAGACTCCTCGCATAGCCTCATGAGTCTTGGGGAAACG | SEQ ID NO: 88 |
| hsa-miR-2110 | ATAGACTCCTCGCATAGCCTCATGAGTCAGGGCCCCC | SEQ ID NO: 89 |
| hsa-miR-296-5p | ATAGACTCCTCGCATAGCCTCATGAGTCTCGACCGGAC | SEQ ID NO: 90 |
| hsa-miR-1307-5p | ATAGACTCCTCGCATAGCCTCATGAGTCTGTGCAAATCTA | SEQ ID NO: 91 |
| hsa-miR-19a-3p | ATAGACTCCTCGCATAGCCTCATGAGTCTCTACAGTGCAC | SEQ ID NO: 92 |
| hsa-miR-139-5p | ATAGACTCCTCGCATAGCCTCATGAGTCAGCAGGTGCG | SEQ ID NO: 93 |
| hsa-miR-3665 | ATAGACTCCTCGCATAGCCTCATGAGTCTACCACAGGGTA | SEQ ID NO: 94 |
| hsa-miR-RG-84 | ATAGACTCCTCGCATAGCCTCATGAGTCGGATCCGAGTC | SEQ ID NO: 95 |
| hsa-miR-4454 | ATAGACTCCTCGCATAGCCTCATGAGTCTGAGGTAGTAGG | SEQ ID NO: 96 |
| hsa-let-7b-5p | ATAGACTCCTCGCATAGCCTCATGAGTCAAAAGTGCTTACAG | SEQ ID NO: 97 |

[0109] 2. A reaction procedure of a PCR instrument was set as follows:

[0110] (1) 25° C. for 10 min; (2) 95° C. for 10 min; (3) 3 cycles of (95° C. for 10 s and 55° C. for 10 min); (4) 3 cycles of (95° C. for 10 s and 50° C. for 10 min); (5) 2 cycles of (95° C. for 10 s and 45° C. for 10 min); (6) 2 cycles of (95° C. for 10 s and 40° C. for 10 min); (7) 2 cycles of (95° C. for 10 s and 37° C. for 10 min); (8) 1 cycle of (95° C. for 10 s, 60° C. for 2 min, and 72° C. for 10 min); and (9) a first PCR tube was incubated at 72° C. for 5 min, and then taken out and immediately incubated in an ice box to terminate an activity of the Taq DNA polymerase.

[0111] 3. After a liquid in the first PCR tube was frozen (about 3 min later), the first PCR tube was placed on a 96-well heat-preservation module (which was frozen to −40° C. in advance).

[0112] 4. 20 μL of chloroform was added, and then the heat-preservation module was immediately vortexed by a vortex until ice cubes melted (about 1 min later).

[0113] 5. A resulting system was centrifuged at 12,000 rpm and 4° C. for 15 min, and a part (typically 18 μL) of a resulting supernatant was pipetted by a pipette and added to a labeled second PCR tube.

[0114] 6. The second PCR tube was carefully centrifuged in a mini centrifuge until the whole sample was precipitated to a bottom of the second PCR tube, then a cap of the second PCR tube was removed, and the second PCR tube with the cap removed was placed in a PCR instrument at 50° C. for 10 min to allow the chloroform completely volatilized.

[0115] 7. 2.5 μL of an EXO I enzyme was added to the second PCR tube, the second PCR tube was inverted up and down for thorough mixing, then carefully centrifuged, and placed in a PCR instrument with a PCR procedure of 37° C. for 4 min, and 5 s before the end of the procedure, the PCR instrument was paused.

[0116] 8. The following PCR procedure was set: 37° C. for 4 min and 80° C. for 1 min, and then the PCR instrument was started.

[0117] 9. The second PCR tube was carefully centrifuged until the whole sample was precipitated to a bottom of the second PCR tube.

### Second PCR Preamplification

[0118] 1. In a 0.2 mL PCR tube, a first PCR preamplification product solution was inverted up and down several times for thorough mixing and then carefully centrifuged in a mini centrifuge until the whole sample was precipitated to a bottom of the PCR tube.

[0119] For a sample, a 20 μL reaction system was prepared specifically from the following reagents: 2× Boost mix: 10 μL, 10 μm magnetic bead-purified transition primer (USEXPnb, TCTACAGATCCTGGCCTCTGACTCCAGGATCTGTAGACCTCCATCCGAGACACACGAT, SEQ ID NO: 99): 1 μL, 10 μm isomiR primer (IsomiRupb, GTTTGTTGCTACGCTCAGAATCCTAAGCGTAGCAACAAACATAGACTCCTCGCATAGCCT CATGAGTC, SEQ ID NO: 100): 1 μL, Tth RecA (0.2 μg/μL): 1 μL, and first PCR preamplification product: 7 μL.

[0120] The 2× Boost mix* (including UDG) was prepared with a dNTP mixed solution without dUTP.

[0121] 2. A Touch Down PCR procedure of the PCR instrument was set as follows:

[0122] (1) 25° C. for 10 min; (2) 95° C. for 10 min; (3) 3 cycles of (95° C. for 10 s and 65° C. for 10 min): (4) 3 cycles of (95° C. for 10 s and 62° C. for 10 min): (5) 2 cycles of (95° C. for 10 s and 58° C. for 2 min); (6) 2 cycles of (95° C. for 10 s and 60° C. for 2 min); (7) 1 cycle of (95° C. for 10 s, 60° C. for 2 min, and 72° C. for 10 min); and (8) a first PCR tube was incubated at 72° C. for 5 min, and then taken out and immediately incubated in an ice bath to stop a Taq activity.

[0123] 3. After a liquid in the first PCR tube was frozen (about 3 min later), the first PCR tube was placed on a 96-well heat-preservation module (which was frozen to −40° C. in advance).

[0124] 4. 20 μL of chloroform was added, and then the heat-preservation module was immediately vortexed by a vortex until ice cubes melted (about 1 min later).

[0125] 5. A resulting system was centrifuged at 12,000 rpm and 4° C. for 15 min, and a part (typically 18 μL) of a resulting supernatant was pipetted by a pipette and added to a labeled second PCR tube.

[0126] 6. The second PCR tube was carefully centrifuged in a mini centrifuge until the whole sample was precipitated to a bottom of the second PCR tube, then a cap of the second PCR tube was removed, and the second PCR tube with the cap removed was placed in a PCR instrument at 50° C. for 10 min to allow the chloroform completely volatilized.

[0127] 7. 4 μL of washed streptavidin magnetic beads was added to every 20 μL of a reaction solution obtained above (the streptavidin magnetic beads were thoroughly mixed by a vortex and then used immediately).

[0128] 8. The second PCR tube was shaken on a shaker at a rotational speed of 500 rpm and room temperature for 30 min.

[0129] 9. The second PCR tube was vortexed by a vortex to make the magnetic beads fully suspended, and then incubated in a PCR instrument at 50° C. for 3 min.

[0130] 10. The second PCR tube was placed on a magnetic separator for about 1 min to adsorb the magnetic beads, and a resulting solution was pipetted by a pipette (the magnetic beads should not be pipetted as much as possible) and added to a labeled third PCR tube.

### Third PCR Preamplification

[0131] 1. In a 0.2 mL PCR tube, a second PCR preamplification product solution was inverted up and down several times for thorough mixing and then carefully centrifuged in a mini centrifuge until the whole sample was precipitated to a bottom of the PCR tube.

[0132] For a sample, a 20 μL reaction system was prepared specifically from the following reagents: 2× Boost mix*: 10 μL, 10 μm UFP (CAGAATCCTAAGCGTAGCAACAAAC, SEQ ID NO: 101): 1 μL, 10 μm URP (GCCTCTGACTCCAGGATCTGTAGAC, SEQ ID NO: 102): 1 μL, Tth RecA (0.2 μg/μL): 1 μL, and second PCR preamplification product: 7 μL.

[0133] The 2× Boost mix* (including UDG) was prepared with a dNTP mixed solution without dUTP.

[0134] 2. A PCR procedure of a PCR instrument was set as follows:

[0135] (1) 95° C. for 10 min; (2) 12 cycles of (95° C. for 10 s and 65° C. for 1 min); (4) 72° C. for 10min; and (5) 72° C. for 5 min, and then a first PCR tube was taken out and immediately immersed in an isopropanol-filled programmed cooling box cryopreserved at −80° C. to terminate an activity of the Tay DNA polymerase (which could avoid non-specific amplification caused by a temperature reduction).

[0136] 3. After a liquid in the first PCR tube was frozen (about 3 min later), the first PCR tube was placed on a 96-well heat-preservation module (which was frozen to −40° C. in advance).

[0137] 4. 20 μL of chloroform was added, and then the heat-preservation module was immediately vortexed by a vortex until ice cubes melted (about 1 min later).

[0138] 5. A resulting system was centrifuged at 12,000 rpm and 4° C. for 15 min, and a part (typically 18 μL) of a resulting supernatant was pipetted by a pipette and added to a labeled second PCR tube.

[0139] 6. The second PCR tube was carefully centrifuged in a mini centrifuge until the whole sample was precipitated to a bottom of the second PCR tube, then a cap of the second PCR tube was removed, and the second PCR tube with the cap removed was placed in a PCR instrument at 50° C. for 10 min to allow the chloroform completely volatilized.

[0140] 7. 2.5 μL of an EXO I (Thermolabile) mixed solution was added per reaction (20 μL).

[0141] 8. The following PCR procedure was set: 37° C. for 4 min and 80° C. for 1 min, and then the PCR instrument was started.

[0142] 9. 5 μL of a resulting reaction system was taken and 10-fold diluted with 0.1× TE, and then used as a PCR template for subsequent detection.

### II. qPCR Amplification Detection

[0143] According to instructions of a manufacturer, a PCR mixture was prepared from the following reagents: 2× DNA polymerase mixture, 0.2 μM (final concentration) each of a forward primer (UFP: CAGAATCCTAAGCGTAGCAACAAAC, SEQ ID NO: 101) and a universal reverse primer (URP: GCCTCTGACTCCAGGATCTGTAGAC, SEQ ID NO: 102), and 0.2 μM (final concentration) LNAFAM probe (ACC+AT+CA+AT+CG+TG+TG (SEQ ID NO: 2064), where + represents an LNA). An amount of a PCR template in a 10 μL PCR system was as follows: 0.08 μL of a third PCR preamplification product 10-fold diluted.

[0144] PCR cycling parameters were as follows: 95° C. for 10 min (USQ-miR DNA polymerase mixture) or 1 min (other 2× DNA polymerase mixture), then 95° C. for 30 s, and 65° C. for 1 min, with 40 cycles.

### III. PCR Amplification for Adding a Barcode and an Adapter (a Sequencing Adapter) to a Preamplification Product

### A. PCR Amplification for Adding a Barcode and an Adapter to a Preamplification Product

### 1. Design of Primers for Adding a Barcode and an Adapter

[0145] A forward primer was designed as follows:
[0146] a sequence overlapping with the forward primer for adding the adapter+IUDI (I5 Index)+a sequence partially overlapping with a 5′-terminus universal sequence of a reverse-transcription product of cDNA.

[0147] A reverse primer was designed as follows:

[0148] a sequence overlapping with a reverse primer for adding the adapter+IUDI (I7 Index)+a sequence partially overlapping with a 3′-terminus sequence of an isomiR primer.

[0149] The I5 Index and the I7 Index are combined in sets, and specific combination modes and specific sequences are shown in Table 2.

TABLE 2
DUDIs for high-throughput samples of NGS

| No. | I5 Index | Sequence No. | I7 Index | Sequence No. |
|---|---|---|---|---|
| 1 | TCAGTATCCT | SEQ ID NO: 103 | CACGCCAACG | SEQ ID NO: 1079 |
| 2 | GCCGAATAGC | SEQ ID NO: 104 | TAAGTAACGA | SEQ ID NO: 1080 |
| 3 | TTACCAGACT | SEQ ID NO: 105 | ACAAGAATCC | SEQ ID NO: 1081 |
| 4 | TTCGCAGCTT | SEQ ID NO: 106 | TAGTTCACCA | SEQ ID NO: 1082 |
| 5 | TCGCAATCTT | SEQ ID NO: 107 | ACACCGACCT | SEQ ID NO: 1083 |
| 6 | TGCCTGATAG | SEQ ID NO: 108 | ACCAATGTAA | SEQ ID NO: 1084 |
| 7 | TGACGACTCT | SEQ ID NO: 109 | ATTCAGTAAG | SEQ ID NO: 1085 |
| 8 | GCATAGACCG | SEQ ID NO: 110 | CCTCGCCTGA | SEQ ID NO: 1086 |
| 9 | TTCCGCGCTT | SEQ ID NO: 111 | ACGAGATAGA | SEQ ID NO: 1087 |
| 10 | GATTGCTGAC | SEQ ID NO: 112 | TGCTCGCCTA | SEQ ID NO: 1088 |
| 11 | GACATAGACG | SEQ ID NO: 113 | CCTATTCGGC | SEQ ID NO: 1089 |
| 12 | GAACCTAATC | SEQ ID NO: 114 | CCGCTGAACC | SEQ ID NO: 1090 |
| 13 | GTAGTAAGAC | SEQ ID NO: 115 | TAGCAGTATC | SEQ ID NO: 1091 |
| 14 | TGCAGTTCTT | SEQ ID NO: 116 | AGACATTACG | SEQ ID NO: 1092 |
| 15 | TTAACATTAC | SEQ ID NO: 117 | CCTTACCTCA | SEQ ID NO: 1093 |
| 16 | GAACTCACGC | SEQ ID NO: 118 | CAGTACGAAT | SEQ ID NO: 1094 |
| 17 | GACGCGCAGA | SEQ ID NO: 119 | TGATAACCTA | SEQ ID NO: 1095 |
| 18 | GGTTCCTTAG | SEQ ID NO: 120 | CCTGATTACG | SEQ ID NO: 1096 |
| 19 | TCCGGCACAC | SEQ ID NO: 121 | CACTGAAGCA | SEQ ID NO: 1097 |
| 20 | GCCTAACTTC | SEQ ID NO: 122 | TGTATTCCAT | SEQ ID NO: 1098 |
| 21 | CAGCACAAGA | SEQ ID NO: 123 | CCTCAAGCCA | SEQ ID NO: 1099 |
| 22 | TAGCAGCTCA | SEQ ID NO: 124 | TAGCAAGCCA | SEQ ID NO: 1100 |
| 23 | ACGCGCCAGA | SEQ ID NO: 125 | ACTTGCCACG | SEQ ID NO: 1101 |
| 24 | ACTCTTGGTT | SEQ ID NO: 126 | CAGACGCCGG | SEQ ID NO: 1102 |
| 25 | TTAATCTTCA | SEQ ID NO: 127 | CAACTAATCG | SEQ ID NO: 1103 |
| 26 | TCATTATTAT | SEQ ID NO: 128 | TGGACTCGCA | SEQ ID NO: 1104 |
| 27 | GCTCACGCAC | SEQ ID NO: 129 | CGCCGACAAC | SEQ ID NO: 1105 |
| 28 | TGTGACTGTG | SEQ ID NO: 130 | CCAGATAATG | SEQ ID NO: 1106 |
| 29 | TTAACTCTCG | SEQ ID NO: 131 | TGAGATAGTA | SEQ ID NO: 1107 |
| 30 | TTACGGCGCA | SEQ ID NO: 132 | AACTGACGAG | SEQ ID NO: 1108 |
| 31 | TTCTCGCCAC | SEQ ID NO: 133 | TAAGCCGATG | SEQ ID NO: 1109 |
| 32 | GGCTCCTACG | SEQ ID NO: 134 | CATTGACACT | SEQ ID NO: 1110 |
| 33 | GACTGCCGCG | SEQ ID NO: 135 | CCTTGATAAT | SEQ ID NO: 1111 |
| 34 | GACAGTTCTC | SEQ ID NO: 136 | TAGTATGACG | SEQ ID NO: 1112 |
| 35 | TGTCCATCAT | SEQ ID NO: 137 | AGAACTGCTC | SEQ ID NO: 1113 |
| 36 | GACCGCTAAG | SEQ ID NO: 138 | TACAATTCCA | SEQ ID NO: 1114 |
| 37 | GCTCGAATAA | SEQ ID NO: 139 | TGTACCTAGA | SEQ ID NO: 1115 |
| 38 | TGGTCAGTCG | SEQ ID NO: 140 | TAATCCATTC | SEQ ID NO: 1116 |
| 39 | GGTTACTCTG | SEQ ID NO: 141 | TGCCTCCATG | SEQ ID NO: 1117 |
| 40 | CAACAGTTCG | SEQ ID NO: 142 | ATACCACGGC | SEQ ID NO: 1118 |
| 41 | TGGCAGTGGT | SEQ ID NO: 143 | AGTTGTATTC | SEQ ID NO: 1119 |
| 42 | TGTTCTGACG | SEQ ID NO: 144 | TAGCTCCATT | SEQ ID NO: 1120 |
| 43 | CAACACGATC | SEQ ID NO: 145 | ATTGCAGTAA | SEQ ID NO: 1121 |
| 44 | CATCAATCAT | SEQ ID NO: 146 | TGTTCAATAG | SEQ ID NO: 1122 |
| 45 | GCACTCCTTA | SEQ ID NO: 147 | CCGGTGACGG | SEQ ID NO: 1123 |
| 46 | AGCATCCAGA | SEQ ID NO: 148 | CGGTATCATA | SEQ ID NO: 1124 |
| 47 | CACTGCATAC | SEQ ID NO: 149 | AACTACTACG | SEQ ID NO: 1125 |
| 48 | GGTGCAGACG | SEQ ID NO: 150 | CCAATTACTG | SEQ ID NO: 1126 |
| 49 | CGCAACGCCG | SEQ ID NO: 151 | CCGCACGCTA | SEQ ID NO: 1127 |
| 50 | AAGACTCTGA | SEQ ID NO: 152 | CCTTGGTATG | SEQ ID NO: 1128 |
| 51 | TGCCTCTAAT | SEQ ID NO: 153 | TGCAGCACGA | SEQ ID NO: 1129 |
| 52 | CGCAGTACGC | SEQ ID NO: 154 | ATAGCCAAGC | SEQ ID NO: 1130 |
| 53 | CATTGCTTGG | SEQ ID NO: 155 | TTAGTAGACC | SEQ ID NO: 1131 |
| 54 | GTAAGATATT | SEQ ID NO: 156 | TAAGAACTAA | SEQ ID NO: 1132 |
| 55 | GGAACAGACT | SEQ ID NO: 157 | CACGATTAAG | SEQ ID NO: 1133 |
| 56 | GTAAGACCGG | SEQ ID NO: 158 | CACAGTGTAG | SEQ ID NO: 1134 |
| 57 | TGCCTAAGTC | SEQ ID NO: 159 | ACACGAATTG | SEQ ID NO: 1135 |
| 58 | TAGACATATT | SEQ ID NO: 160 | TAGCACCGAC | SEQ ID NO: 1136 |
| 59 | GACTTATCCT | SEQ ID NO: 161 | CAAGAATAAC | SEQ ID NO: 1137 |
| 60 | TCGCATCGAA | SEQ ID NO: 162 | AAGCCGCACT | SEQ ID NO: 1138 |
| 61 | ACTTAGTTAC | SEQ ID NO: 163 | AGTTCAGATT | SEQ ID NO: 1139 |
| 62 | TCACAGTCAC | SEQ ID NO: 164 | TCACCACGAT | SEQ ID NO: 1140 |
| 63 | GGCCTCTTGG | SEQ ID NO: 165 | CAGCGATTGT | SEQ ID NO: 1141 |
| 64 | GTAGACCAAT | SEQ ID NO: 166 | TGCCAGCGCG | SEQ ID NO: 1142 |
| 65 | GTAATATCAG | SEQ ID NO: 167 | TGGCTCCTCA | SEQ ID NO: 1143 |
| 66 | AATTCGATGC | SEQ ID NO: 168 | TGACCTCGCC | SEQ ID NO: 1144 |
| 67 | GCTGCGCTAC | SEQ ID NO: 169 | TACGACTCAA | SEQ ID NO: 1145 |
| 68 | GATGTCCTTC | SEQ ID NO: 170 | TAATTGCCAA | SEQ ID NO: 1146 |
| 69 | AACTCTTGTG | SEQ ID NO: 171 | AACGGCGATA | SEQ ID NO: 1147 |
| 70 | GCGCCGCGCT | SEQ ID NO: 172 | CTCGATTCCA | SEQ ID NO: 1148 |
| 71 | TAGACTACTC | SEQ ID NO: 173 | ATACGCTTCG | SEQ ID NO: 1149 |
| 72 | TCCTGACACA | SEQ ID NO: 174 | TGATGATGAT | SEQ ID NO: 1150 |
| 73 | GAATACCAAG | SEQ ID NO: 175 | CTACCTGAAT | SEQ ID NO: 1151 |
| 74 | GCCTGCCGAC | SEQ ID NO: 176 | CTACACTCAA | SEQ ID NO: 1152 |
| 75 | TGGCCGATAC | SEQ ID NO: 177 | TTGTGATAGC | SEQ ID NO: 1153 |
| 76 | TCCGACGTAT | SEQ ID NO: 178 | CAATTCGCGC | SEQ ID NO: 1154 |
| 77 | ACAGTTACTA | SEQ ID NO: 179 | CATGGCATTG | SEQ ID NO: 1155 |
| 78 | GCACCTAGAC | SEQ ID NO: 180 | CTTCTGACTT | SEQ ID NO: 1156 |
| 79 | ACTACGTCCT | SEQ ID NO: 181 | AGAGAACCAA | SEQ ID NO: 1157 |
| 80 | CTCATTATTC | SEQ ID NO: 182 | ATTCACAAGA | SEQ ID NO: 1158 |
| 81 | TGACACAACT | SEQ ID NO: 183 | CACCAGCTAA | SEQ ID NO: 1159 |
| 82 | GAGAATAGCT | SEQ ID NO: 184 | CAAGTTAGCG | SEQ ID NO: 1160 |
| 83 | GATGCCTCAA | SEQ ID NO: 185 | TGCGCCTTCG | SEQ ID NO: 1161 |
| 84 | GAGACACTGC | SEQ ID NO: 186 | CCAACCACAT | SEQ ID NO: 1162 |
| 85 | ACACTGCTCT | SEQ ID NO: 187 | ACGCCATGTA | SEQ ID NO: 1163 |
| 86 | GAATGTTACC | SEQ ID NO: 188 | CAGTTAGACG | SEQ ID NO: 1164 |
| 87 | GCGCGAAGCC | SEQ ID NO: 189 | CCTCAATTAG | SEQ ID NO: 1165 |
| 88 | TGTGCGCCGA | SEQ ID NO: 190 | AACACTGGTA | SEQ ID NO: 1166 |
| 89 | AGCTGCACTG | SEQ ID NO: 191 | AATCCGCTAA | SEQ ID NO: 1167 |
| 90 | GACCTAATCT | SEQ ID NO: 192 | TGGAACCATA | SEQ ID NO: 1168 |
| 91 | TCTAGCTGCT | SEQ ID NO: 193 | TCGCTCAACA | SEQ ID NO: 1169 |
| 92 | TTGCCACGCG | SEQ ID NO: 194 | ACTACCAGTA | SEQ ID NO: 1170 |
| 93 | GGATTAGCGA | SEQ ID NO: 195 | CCTGAACCGA | SEQ ID NO: 1171 |
| 94 | GCGCTCTCAT | SEQ ID NO: 196 | TTGCCGACTC | SEQ ID NO: 1172 |
| 95 | GAGCTACTCC | SEQ ID NO: 197 | CCTAGACGCT | SEQ ID NO: 1173 |
| 96 | TCGCACTGGC | SEQ ID NO: 198 | ATACCAACTA | SEQ ID NO: 1174 |
| 97 | GAAGTTCTCT | SEQ ID NO: 199 | CAATACCACC | SEQ ID NO: 1175 |
| 98 | ACATTAAGTG | SEQ ID NO: 200 | ATGAGAGAAC | SEQ ID NO: 1176 |
| 99 | GCTCCTCAGA | SEQ ID NO: 201 | GGAACTAAGT | SEQ ID NO: 1177 |
| 100 | CAGATGTACG | SEQ ID NO: 202 | AGATAGAACC | SEQ ID NO: 1178 |
| 101 | ATCCTCAGCT | SEQ ID NO: 203 | AATTACTCCA | SEQ ID NO: 1179 |
| 102 | CTCTGCCAAC | SEQ ID NO: 204 | TGCTTCAATT | SEQ ID NO: 1180 |
| 103 | GTGGCAAGCC | SEQ ID NO: 205 | CAGTGGTACA | SEQ ID NO: 1181 |
| 104 | GAAGTTGACG | SEQ ID NO: 206 | GGCGGTTGTG | SEQ ID NO: 1182 |
| 105 | ACTCGTTCCG | SEQ ID NO: 207 | ACACGGTGCC | SEQ ID NO: 1183 |
| 106 | GGCTTGGTCG | SEQ ID NO: 208 | CATGTCACTA | SEQ ID NO: 1184 |
| 107 | AGCCTTCTAG | SEQ ID NO: 209 | CTACTGATGT | SEQ ID NO: 1185 |
| 108 | TCTACTGCTT | SEQ ID NO: 210 | ACAGCCTTAC | SEQ ID NO: 1186 |
| 109 | ACCTCAATAC | SEQ ID NO: 211 | AGTTACAGCG | SEQ ID NO: 1187 |
| 110 | GCTCTCAACT | SEQ ID NO: 212 | TATATAGATT | SEQ ID NO: 1188 |
| 111 | TCTCTTCAAG | SEQ ID NO: 213 | TACCGCAATC | SEQ ID NO: 1189 |
| 112 | TCGGACGGTG | SEQ ID NO: 214 | ACGATAGTGG | SEQ ID NO: 1190 |
| 113 | CGCTCTCCAA | SEQ ID NO: 215 | ATACGATAGC | SEQ ID NO: 1191 |
| 114 | GTAAGCGGTT | SEQ ID NO: 216 | CGGTTCCTCG | SEQ ID NO: 1192 |
| 115 | GCATTGAAGC | SEQ ID NO: 217 | TACGGAGTAA | SEQ ID NO: 1193 |
| 116 | ATATCAAGCA | SEQ ID NO: 218 | ACACGCATAA | SEQ ID NO: 1194 |
| 117 | ATCCTAGCGC | SEQ ID NO: 219 | CATAAGATTC | SEQ ID NO: 1195 |
| 118 | TAGTTGTTGT | SEQ ID NO: 220 | TACCAGACGC | SEQ ID NO: 1196 |
| 119 | TCGTCCTACG | SEQ ID NO: 221 | TCATTCCTAA | SEQ ID NO: 1197 |
| 120 | CGAACGATCT | SEQ ID NO: 222 | CATACGAATA | SEQ ID NO: 1198 |
| 121 | TTACAACACA | SEQ ID NO: 223 | CTTGAACACT | SEQ ID NO: 1199 |
| 122 | TCTGACGACA | SEQ ID NO: 224 | TGACGGCTAA | SEQ ID NO: 1200 |
| 123 | TCTGAATCTG | SEQ ID NO: 225 | TATGTAAGCT | SEQ ID NO: 1201 |
| 124 | TTATTGAATA | SEQ ID NO: 226 | ACGGACCAGC | SEQ ID NO: 1202 |
| 125 | AGGACCACGC | SEQ ID NO: 227 | GGCAGATGAG | SEQ ID NO: 1203 |
| 126 | CTCCACCGAT | SEQ ID NO: 228 | AGAAGTATAG | SEQ ID NO: 1204 |
| 127 | GATGGTGACC | SEQ ID NO: 229 | TAATAATCTG | SEQ ID NO: 1205 |
| 128 | TTAGTGTCAA | SEQ ID NO: 230 | AATCGCCTCG | SEQ ID NO: 1206 |
| 129 | GTTCTTCATG | SEQ ID NO: 231 | CCTTGTGGTG | SEQ ID NO: 1207 |
| 130 | TCAGGTGATC | SEQ ID NO: 232 | GGAATAGATA | SEQ ID NO: 1208 |
| 131 | CTCTCATTGA | SEQ ID NO: 233 | CAGAAGTTGG | SEQ ID NO: 1209 |
| 132 | GCAAGTGGTC | SEQ ID NO: 234 | TGGTAGAGTT | SEQ ID NO: 1210 |
| 133 | ACCAGTACTT | SEQ ID NO: 235 | ATTCACCAAT | SEQ ID NO: 1211 |
| 134 | GTGCTAATCG | SEQ ID NO: 236 | CCTGGTAACT | SEQ ID NO: 1212 |
| 135 | TCACGTACTC | SEQ ID NO: 237 | CATCGGTAGA | SEQ ID NO: 1213 |
| 136 | AGCCGCGCAC | SEQ ID NO: 238 | TTCTTGACTT | SEQ ID NO: 1214 |
| 137 | GCAACAATTA | SEQ ID NO: 239 | CTGACCACCA | SEQ ID NO: 1215 |
| 138 | GAATCGACGG | SEQ ID NO: 240 | TGAGCGGCGG | SEQ ID NO: 1216 |
| 139 | ATCTAGCTCT | SEQ ID NO: 241 | ACGGAGACAG | SEQ ID NO: 1217 |
| 140 | AACTGAACGT | SEQ ID NO: 242 | CATATAACAG | SEQ ID NO: 1218 |
| 141 | GGAGCAGCAC | SEQ ID NO: 243 | CACTCACACC | SEQ ID NO: 1219 |
| 142 | GCGGAACGCC | SEQ ID NO: 244 | CCTGCCTCAC | SEQ ID NO: 1220 |
| 143 | GTTACATGCC | SEQ ID NO: 245 | TGAAGTTGAG | SEQ ID NO: 1221 |
| 144 | GTTGGCAGAC | SEQ ID NO: 246 | CATAGCGACC | SEQ ID NO: 1222 |
| 145 | AGTTATTGTT | SEQ ID NO: 247 | ACAGCGACGC | SEQ ID NO: 1223 |
| 146 | TCGATGCTTA | SEQ ID NO: 248 | ACTGCTCGCT | SEQ ID NO: 1224 |
| 147 | GTTGCTCTAA | SEQ ID NO: 249 | TTCATTGGCG | SEQ ID NO: 1225 |
| 148 | GACAGAAGAC | SEQ ID NO: 250 | CATGTATAGT | SEQ ID NO: 1226 |
| 149 | TCTCTGCCAT | SEQ ID NO: 251 | CTACAATAAT | SEQ ID NO: 1227 |
| 150 | GATTCGTTCC | SEQ ID NO: 252 | CACGCATGTT | SEQ ID NO: 1228 |
| 151 | GTAATGAACT | SEQ ID NO: 253 | TGGAGCCACG | SEQ ID NO: 1229 |
| 152 | AGACATACCA | SEQ ID NO: 254 | AATGTGACGG | SEQ ID NO: 1230 |
| 153 | ATCAACTGAG | SEQ ID NO: 255 | AACTGGCACA | SEQ ID NO: 1231 |
| 154 | CTGGACTCGA | SEQ ID NO: 256 | TGAGACGCGC | SEQ ID NO: 1232 |
| 155 | GAACTAGAGC | SEQ ID NO: 257 | CAGTGAGCAT | SEQ ID NO: 1233 |
| 156 | GATCAACAGC | SEQ ID NO: 258 | CGCATATTCC | SEQ ID NO: 1234 |
| 157 | GCGTAGCCGA | SEQ ID NO: 259 | CTAGAGATAG | SEQ ID NO: 1235 |
| 158 | TGCACAATGG | SEQ ID NO: 260 | AACCTCTACC | SEQ ID NO: 1236 |
| 159 | GGTATCTTGC | SEQ ID NO: 261 | CTCATGTTAA | SEQ ID NO: 1237 |
| 160 | TCTAACTGTA | SEQ ID NO: 262 | ACGCAATTCA | SEQ ID NO: 1238 |
| 161 | CGCGCTACTT | SEQ ID NO: 263 | CACTCCATCA | SEQ ID NO: 1239 |
| 162 | GTTAATGAGC | SEQ ID NO: 264 | TACCGCTGAT | SEQ ID NO: 1240 |
| 163 | AACACAATGC | SEQ ID NO: 265 | AGTTGACCAT | SEQ ID NO: 1241 |
| 164 | GCCGGTCGCG | SEQ ID NO: 266 | CTTACTGCCA | SEQ ID NO: 1242 |
| 165 | TAGAAGTGCT | SEQ ID NO: 267 | ATATGGTAGA | SEQ ID NO: 1243 |
| 166 | AGTAGCGCGG | SEQ ID NO: 268 | AGATCACGAG | SEQ ID NO: 1244 |
| 167 | TGCACGTTCA | SEQ ID NO: 269 | TGTAGCGGCC | SEQ ID NO: 1245 |
| 168 | TAGCAACTAT | SEQ ID NO: 270 | CCGCCACTCT | SEQ ID NO: 1246 |
| 169 | GACCGCGTTC | SEQ ID NO: 271 | CGACCTTACC | SEQ ID NO: 1247 |
| 170 | GAGTGACGAT | SEQ ID NO: 272 | CATCGAGAGT | SEQ ID NO: 1248 |
| 171 | GCTACTACTG | SEQ ID NO: 273 | CCTGGTATGG | SEQ ID NO: 1249 |
| 172 | AAGCAAGGTC | SEQ ID NO: 274 | ACGGTCAGAA | SEQ ID NO: 1250 |
| 173 | TGTCTTCGGT | SEQ ID NO: 275 | CACTTGTATA | SEQ ID NO: 1251 |
| 174 | CGCGCTAACC | SEQ ID NO: 276 | CTTCGACCTC | SEQ ID NO: 1252 |
| 175 | CAGTTCTGAA | SEQ ID NO: 277 | TTAGTGCATT | SEQ ID NO: 1253 |
| 176 | ACGTTACTAG | SEQ ID NO: 278 | AGAGTTAAGC | SEQ ID NO: 1254 |
| 177 | GAGACGGAAT | SEQ ID NO: 279 | CAGCGGAGCA | SEQ ID NO: 1255 |
| 178 | TAGCTTGCGC | SEQ ID NO: 280 | CGATTACCTC | SEQ ID NO: 1256 |
| 179 | GCAAGTGACA | SEQ ID NO: 281 | CGACCATCCT | SEQ ID NO: 1257 |
| 180 | TCGCAGGTAT | SEQ ID NO: 282 | GACTATTAGA | SEQ ID NO: 1258 |
| 181 | CTTGCACGAA | SEQ ID NO: 283 | ATAACTGATA | SEQ ID NO: 1259 |
| 182 | AGTGGAACTA | SEQ ID NO: 284 | ATGAATCAGC | SEQ ID NO: 1260 |
| 183 | GGATAACTAT | SEQ ID NO: 285 | TACCTTGTTC | SEQ ID NO: 1261 |
| 184 | GCCTGGTGTG | SEQ ID NO: 286 | TTAGATGCTG | SEQ ID NO: 1262 |
| 185 | ATCGCTCCAA | SEQ ID NO: 287 | CATACCGCTT | SEQ ID NO: 1263 |
| 186 | GTTGCTGTGC | SEQ ID NO: 288 | TGTTGCGGTG | SEQ ID NO: 1264 |
| 187 | TTAAGTGCGC | SEQ ID NO: 289 | AGATCCTGAT | SEQ ID NO: 1265 |
| 188 | GTAGCTGGAC | SEQ ID NO: 290 | TTCCGCTAGA | SEQ ID NO: 1266 |
| 189 | GCTCCACGTT | SEQ ID NO: 291 | TTCAACACAC | SEQ ID NO: 1267 |
| 190 | GATGCTCATT | SEQ ID NO: 292 | TGTATGCACG | SEQ ID NO: 1268 |
| 191 | TCAGCGGCTA | SEQ ID NO: 293 | CTTCAGAACT | SEQ ID NO: 1269 |
| 192 | TTGCCTCGTC | SEQ ID NO: 294 | AAGACCACTG | SEQ ID NO: 1270 |
| 193 | ACCTCCGAAC | SEQ ID NO: 295 | TGCAGATTGT | SEQ ID NO: 1271 |
| 194 | CGATCCATAT | SEQ ID NO: 296 | AGAACACTGT | SEQ ID NO: 1272 |
| 195 | TCCTCGATCG | SEQ ID NO: 297 | CGCACACCAG | SEQ ID NO: 1273 |
| 196 | GGCGGACACA | SEQ ID NO: 298 | CGCATAGACT | SEQ ID NO: 1274 |
| 197 | GGCTCCGCTA | SEQ ID NO: 299 | CACTCTACTA | SEQ ID NO: 1275 |
| 198 | AGTGGTAGCG | SEQ ID NO: 300 | TAATCGGTGA | SEQ ID NO: 1276 |
| 199 | GGCTCACGTT | SEQ ID NO: 301 | CTAAGATGCT | SEQ ID NO: 1277 |
| 200 | GGATCTTGCT | SEQ ID NO: 302 | TTCTTGGCCG | SEQ ID NO: 1278 |
| 201 | AACACCTGGT | SEQ ID NO: 303 | CGGTCGAGAC | SEQ ID NO: 1279 |
| 202 | GAGCTGTAAG | SEQ ID NO: 304 | GGACCGAGTG | SEQ ID NO: 1280 |
| 203 | GTATGTGCAG | SEQ ID NO: 305 | CCGCCTCCAA | SEQ ID NO: 1281 |
| 204 | CATCGCTATT | SEQ ID NO: 306 | TGGTATTCAA | SEQ ID NO: 1282 |
| 205 | AGTACTTCAT | SEQ ID NO: 307 | AATAACACCT | SEQ ID NO: 1283 |
| 206 | ACTCGCGGAA | SEQ ID NO: 308 | CTCAGACCTG | SEQ ID NO: 1284 |
| 207 | GGCCGTATGA | SEQ ID NO: 309 | CTAACAGCAC | SEQ ID NO: 1285 |
| 208 | TCCGTCGCCT | SEQ ID NO: 310 | CCAGCAACGT | SEQ ID NO: 1286 |
| 209 | GCTCGGTACT | SEQ ID NO: 311 | CGGACATTGG | SEQ ID NO: 1287 |
| 210 | GCCTGTTATC | SEQ ID NO: 312 | TAAGCTATTG | SEQ ID NO: 1288 |
| 211 | ACTGTACTAC | SEQ ID NO: 313 | AGTGATTCTC | SEQ ID NO: 1289 |
| 212 | ATCTCAGAAT | SEQ ID NO: 314 | ACAGCCGATC | SEQ ID NO: 1290 |
| 213 | CTCCTACTAG | SEQ ID NO: 315 | AGCCAATGAG | SEQ ID NO: 1291 |
| 214 | GGAAGCAGCA | SEQ ID NO: 316 | TATTACCTGG | SEQ ID NO: 1292 |
| 215 | GGCATGTGGA | SEQ ID NO: 317 | TACAATGTGG | SEQ ID NO: 1293 |
| 216 | AGCGATCCGA | SEQ ID NO: 318 | CAACGGAATT | SEQ ID NO: 1294 |
| 217 | GCCACTACAA | SEQ ID NO: 319 | GATGAATGCC | SEQ ID NO: 1295 |
| 218 | AACCGTGCCT | SEQ ID NO: 320 | CCATCACCTA | SEQ ID NO: 1296 |
| 219 | CATCACGGAT | SEQ ID NO: 321 | CACAACTCAT | SEQ ID NO: 1297 |
| 220 | GTCGATTGGT | SEQ ID NO: 322 | CGCCTAACCT | SEQ ID NO: 1298 |
| 221 | GTCAATGTCC | SEQ ID NO: 323 | CACTGCGCTC | SEQ ID NO: 1299 |
| 222 | ATATCCGCCG | SEQ ID NO: 324 | ATCAGACTGG | SEQ ID NO: 1300 |
| 223 | TTAATACAAG | SEQ ID NO: 325 | TATGCAAGTG | SEQ ID NO: 1301 |
| 224 | CTCTGATCTT | SEQ ID NO: 326 | CATACTCTAA | SEQ ID NO: 1302 |
| 225 | AGCCTGGAAC | SEQ ID NO: 327 | AGTGCTTACA | SEQ ID NO: 1303 |
| 226 | GAAGCCTCGG | SEQ ID NO: 328 | CACATACTAA | SEQ ID NO: 1304 |
| 227 | TGGTCGCGCT | SEQ ID NO: 329 | CCACATGGTA | SEQ ID NO: 1305 |
| 228 | GTTAATTCTT | SEQ ID NO: 330 | CGGCTTGTGG | SEQ ID NO: 1306 |
| 229 | GATCTACGCG | SEQ ID NO: 331 | CGAGACTGCA | SEQ ID NO: 1307 |
| 230 | GCAACTGAAT | SEQ ID NO: 332 | GGTGTCCAAT | SEQ ID NO: 1308 |
| 231 | GCCAGCTTGA | SEQ ID NO: 333 | GGTACTCTTG | SEQ ID NO: 1309 |
| 232 | TGTGCATGCT | SEQ ID NO: 334 | AACCATTCAT | SEQ ID NO: 1310 |
| 233 | CAGGTGATCT | SEQ ID NO: 335 | GGAACGCAAG | SEQ ID NO: 1311 |
| 234 | ACGCCTCTTA | SEQ ID NO: 336 | ATGTACTTCC | SEQ ID NO: 1312 |
| 235 | AATCAGCTGC | SEQ ID NO: 337 | TACAACGATC | SEQ ID NO: 1313 |
| 236 | AGACACCTCT | SEQ ID NO: 338 | TACGCATGGC | SEQ ID NO: 1314 |
| 237 | GGTCCTGTCA | SEQ ID NO: 339 | TGGTCCGATA | SEQ ID NO: 1315 |
| 238 | GTAACTGCGA | SEQ ID NO: 340 | CTCGGCGACA | SEQ ID NO: 1316 |
| 239 | TCCGCGTTCT | SEQ ID NO: 341 | TCAATGCTCG | SEQ ID NO: 1317 |
| 240 | TCTCATGGCC | SEQ ID NO: 342 | GATTCAGAGT | SEQ ID NO: 1318 |
| 241 | TCGCGGCTGG | SEQ ID NO: 343 | TCATGGTTGA | SEQ ID NO: 1319 |
| 242 | AAGTTCATAC | SEQ ID NO: 344 | CCTCTCAAGG | SEQ ID NO: 1320 |
| 243 | TCCTAGTCGA | SEQ ID NO: 345 | AATGCAGCCA | SEQ ID NO: 1321 |
| 244 | AATATTGCCA | SEQ ID NO: 346 | TTGAGTGATA | SEQ ID NO: 1322 |
| 245 | CATGGCTGCA | SEQ ID NO: 347 | ACTACCGGCG | SEQ ID NO: 1323 |
| 246 | ATCCTGATTA | SEQ ID NO: 348 | ACATCCTGCC | SEQ ID NO: 1324 |
| 247 | GTGTAACCGG | SEQ ID NO: 349 | CTCTGCAACG | SEQ ID NO: 1325 |
| 248 | GCCTAGCGGT | SEQ ID NO: 350 | TTACAAGCTA | SEQ ID NO: 1326 |
| 249 | TGTGGATAAC | SEQ ID NO: 351 | ACTGCTCTTG | SEQ ID NO: 1327 |
| 250 | GTGACTATTC | SEQ ID NO: 352 | CACGCAGCTG | SEQ ID NO: 1328 |
| 251 | AGCACTCTCG | SEQ ID NO: 353 | AATTGGAGCC | SEQ ID NO: 1329 |
| 252 | AGCTGAACAC | SEQ ID NO: 354 | GCAGATAACA | SEQ ID NO: 1330 |
| 253 | TCTTACCAGA | SEQ ID NO: 355 | CTCATCGATA | SEQ ID NO: 1331 |
| 254 | TCTAATCCTG | SEQ ID NO: 356 | ATCATGACTG | SEQ ID NO: 1332 |
| 255 | GAAGTATTCC | SEQ ID NO: 357 | GAAGTATGAA | SEQ ID NO: 1333 |
| 256 | CAGCTACACT | SEQ ID NO: 358 | ATGTAAGAAG | SEQ ID NO: 1334 |
| 257 | CGTAAGCATT | SEQ ID NO: 359 | ACTAGACGTA | SEQ ID NO: 1335 |
| 258 | TCACTATACG | SEQ ID NO: 360 | AGCTGCCTAG | SEQ ID NO: 1336 |
| 259 | AAGGTATTCG | SEQ ID NO: 361 | GTGCAGCCTA | SEQ ID NO: 1337 |
| 260 | GTTGATACCT | SEQ ID NO: 362 | CTCTGTAAGT | SEQ ID NO: 1338 |
| 261 | ACTGTTCTGA | SEQ ID NO: 363 | CACGACTGGT | SEQ ID NO: 1339 |
| 262 | GTAGACATGC | SEQ ID NO: 364 | TCGAACATCA | SEQ ID NO: 1340 |
| 263 | TCGACCGTAG | SEQ ID NO: 365 | CAGCGTACAA | SEQ ID NO: 1341 |
| 264 | AGAGTAAGTC | SEQ ID NO: 366 | CATAATAATG | SEQ ID NO: 1342 |
| 265 | TTCAAGTCTC | SEQ ID NO: 367 | ACGATAATTC | SEQ ID NO: 1343 |
| 266 | AGACGCTGTG | SEQ ID NO: 368 | AGACTGTGAG | SEQ ID NO: 1344 |
| 267 | GCAGCACGAG | SEQ ID NO: 369 | TTGTTGACGG | SEQ ID NO: 1345 |
| 268 | CATTATGCCT | SEQ ID NO: 370 | ACTCATGTGG | SEQ ID NO: 1346 |
| 269 | GCCACATCAC | SEQ ID NO: 371 | CGGCCATTCA | SEQ ID NO: 1347 |
| 270 | AGTTCCGGAC | SEQ ID NO: 372 | ACCTCATTCT | SEQ ID NO: 1348 |
| 271 | CTCTGTAGTC | SEQ ID NO: 373 | TCCGCACAGC | SEQ ID NO: 1349 |
| 272 | GTCCTCCTAC | SEQ ID NO: 374 | TCGCCGGAGC | SEQ ID NO: 1350 |
| 273 | TCGACAGGTG | SEQ ID NO: 375 | GAGACAACCG | SEQ ID NO: 1351 |
| 274 | GCTTCAGCGC | SEQ ID NO: 376 | GGTACCTTCA | SEQ ID NO: 1352 |
| 275 | ATTGCGGCGG | SEQ ID NO: 377 | AACGCGATAA | SEQ ID NO: 1353 |
| 276 | TCACACTAGT | SEQ ID NO: 378 | CATTCAACAT | SEQ ID NO: 1354 |
| 277 | GCTGGATGCA | SEQ ID NO: 379 | TGAGTGTATA | SEQ ID NO: 1355 |
| 278 | TGTATGTGAG | SEQ ID NO: 380 | CGCAGTGAGA | SEQ ID NO: 1356 |
| 279 | CGTTCCAACC | SEQ ID NO: 381 | ATATGACGCG | SEQ ID NO: 1357 |
| 280 | GCGCTTAGAT | SEQ ID NO: 382 | CACTGCTACC | SEQ ID NO: 1358 |
| 281 | AATCGGTTGG | SEQ ID NO: 383 | AGCTTCAGAC | SEQ ID NO: 1359 |
| 282 | TTCCAAGGAT | SEQ ID NO: 384 | GGCTTAGCAG | SEQ ID NO: 1360 |
| 283 | AGCCGAAGCG | SEQ ID NO: 385 | CGATCAGAGT | SEQ ID NO: 1361 |
| 284 | GTGCATCACC | SEQ ID NO: 386 | CTATCGCTCC | SEQ ID NO: 1362 |
| 285 | CGTCCGGCCT | SEQ ID NO: 387 | ACTTCCGCAG | SEQ ID NO: 1363 |
| 286 | GATATCTAGT | SEQ ID NO: 388 | CAACGGTAAC | SEQ ID NO: 1364 |
| 287 | TGAGCGGACA | SEQ ID NO: 389 | ACCACTTACC | SEQ ID NO: 1365 |
| 288 | CTGTTAGCGA | SEQ ID NO: 390 | CACAGTATCC | SEQ ID NO: 1366 |
| 289 | CCAGACAGTC | SEQ ID NO: 391 | TAACGGTCGC | SEQ ID NO: 1367 |
| 290 | CGTAGATTCA | SEQ ID NO: 392 | TTGCTCACAG | SEQ ID NO: 1368 |
| 291 | AGCTAATCGA | SEQ ID NO: 393 | ACCTACGCGA | SEQ ID NO: 1369 |
| 292 | TTCTCGTCCT | SEQ ID NO: 394 | TCCAATTAGT | SEQ ID NO: 1370 |
| 293 | TGTACTAGTT | SEQ ID NO: 395 | AGAATTATTC | SEQ ID NO: 1371 |
| 294 | GACTTACTGT | SEQ ID NO: 396 | CGAACTGCCG | SEQ ID NO: 1372 |
| 295 | GATAGATATC | SEQ ID NO: 397 | TTGTTGCGCC | SEQ ID NO: 1373 |
| 296 | ACTGATATCC | SEQ ID NO: 398 | ATGCAACCTT | SEQ ID NO: 1374 |
| 297 | GCGAATCTAA | SEQ ID NO: 399 | CCTATCGGTA | SEQ ID NO: 1375 |
| 298 | CTCTCAAGTG | SEQ ID NO: 400 | AATAGTCGAT | SEQ ID NO: 1376 |
| 299 | GGCTCTTCGC | SEQ ID NO: 401 | GAGCAATGAT | SEQ ID NO: 1377 |
| 300 | ACGTCGATCC | SEQ ID NO: 402 | ACAGCTCAGA | SEQ ID NO: 1378 |
| 301 | AATTAAGAAT | SEQ ID NO: 403 | CCACGCTTGT | SEQ ID NO: 1379 |
| 302 | AGCGCTCGAT | SEQ ID NO: 404 | AAGCCTGGCA | SEQ ID NO: 1380 |
| 303 | GTTAGGAACC | SEQ ID NO: 405 | CAGGACAGTG | SEQ ID NO: 1381 |
| 304 | CATGTCGAAC | SEQ ID NO: 406 | TCAAGTTATT | SEQ ID NO: 1382 |
| 305 | GTTCATACAG | SEQ ID NO: 407 | CCACACAATT | SEQ ID NO: 1383 |
| 306 | AACGCCGGCA | SEQ ID NO: 408 | AGAAGATTGC | SEQ ID NO: 1384 |
| 307 | TGTAGAGTCG | SEQ ID NO: 409 | AAGACGGTCC | SEQ ID NO: 1385 |
| 308 | TGCGACCACG | SEQ ID NO: 410 | ACTGAGTGCT | SEQ ID NO: 1386 |
| 309 | TCCTCTCTAT | SEQ ID NO: 411 | AGACGCGAGA | SEQ ID NO: 1387 |
| 310 | GTAATCCGTA | SEQ ID NO: 412 | TAACTTGGAG | SEQ ID NO: 1388 |
| 311 | GCTGAGCGAA | SEQ ID NO: 413 | TCCGGTACGA | SEQ ID NO: 1389 |
| 312 | GTGTTCCAGC | SEQ ID NO: 414 | TTAGTAATCT | SEQ ID NO: 1390 |
| 313 | GAGAAGACGA | SEQ ID NO: 415 | CCGGCCAGTA | SEQ ID NO: 1391 |
| 314 | GCCGGACTGG | SEQ ID NO: 416 | GTCGCTAATC | SEQ ID NO: 1392 |
| 315 | TCGTTCCATC | SEQ ID NO: 417 | AGATATCGAC | SEQ ID NO: 1393 |
| 316 | GCACAGATGT | SEQ ID NO: 418 | CCTCAATAGT | SEQ ID NO: 1394 |
| 317 | CGCGATCAAT | SEQ ID NO: 419 | ACGGTTCACT | SEQ ID NO: 1395 |
| 318 | GTTGGCGCCG | SEQ ID NO: 420 | TATGACATTC | SEQ ID NO: 1396 |
| 319 | ATCTCATCAC | SEQ ID NO: 421 | ATCACAACCG | SEQ ID NO: 1397 |
| 320 | AGTATGATCT | SEQ ID NO: 422 | TAACTCGGCC | SEQ ID NO: 1398 |
| 321 | GTACCACCAT | SEQ ID NO: 423 | TAACGATCTT | SEQ ID NO: 1399 |
| 322 | CTATAACTGG | SEQ ID NO: 424 | ACGAGAACCT | SEQ ID NO: 1400 |
| 323 | TAATCTCATC | SEQ ID NO: 425 | CAGCCATCTA | SEQ ID NO: 1401 |
| 324 | TACTCCGGCG | SEQ ID NO: 426 | ATGGCAATTA | SEQ ID NO: 1402 |
| 325 | CGCTCGATTC | SEQ ID NO: 427 | AGCACCTCTC | SEQ ID NO: 1403 |
| 326 | GTTGCCAGCA | SEQ ID NO: 428 | TTCTATTCGG | SEQ ID NO: 1404 |
| 327 | GGTAGGCCAT | SEQ ID NO: 429 | GGCAAGCACG | SEQ ID NO: 1405 |
| 328 | ACGACGTCAG | SEQ ID NO: 430 | TGGTAACAGC | SEQ ID NO: 1406 |
| 329 | CGTCCACACG | SEQ ID NO: 431 | ATACTAATCA | SEQ ID NO: 1407 |
| 330 | AAGTGCTGGC | SEQ ID NO: 432 | AACGAATCTG | SEQ ID NO: 1408 |
| 331 | CAGCTAAGGA | SEQ ID NO: 433 | GGACAACGCT | SEQ ID NO: 1409 |
| 332 | GTTAACTCAG | SEQ ID NO: 434 | TATTACTATC | SEQ ID NO: 1410 |
| 333 | ACAAGTGTAC | SEQ ID NO: 435 | ACAGCAGGAT | SEQ ID NO: 1411 |
| 334 | GCACGCGATG | SEQ ID NO: 436 | TACTCATTCC | SEQ ID NO: 1412 |
| 335 | TCTCATCCGT | SEQ ID NO: 437 | TTAGTTGCGT | SEQ ID NO: 1413 |
| 336 | GCGGTGGTGG | SEQ ID NO: 438 | GGAAGTCATA | SEQ ID NO: 1414 |
| 337 | TTAGCTAGAG | SEQ ID NO: 439 | ATTCATTGGC | SEQ ID NO: 1415 |
| 338 | TAGTAAGGTG | SEQ ID NO: 440 | ACCAGGTAAG | SEQ ID NO: 1416 |
| 339 | TATCTTAGTG | SEQ ID NO: 441 | AGTAGACAAC | SEQ ID NO: 1417 |
| 340 | CGTAGCTCCG | SEQ ID NO: 442 | CATCCGGTTC | SEQ ID NO: 1418 |
| 341 | ATCGGTAGCC | SEQ ID NO: 443 | CTCCATATTA | SEQ ID NO: 1419 |
| 342 | GCGGCAGAAG | SEQ ID NO: 444 | TTAGAGAAGA | SEQ ID NO: 1420 |
| 343 | GGCGTTGAAG | SEQ ID NO: 445 | TTATCCGTAA | SEQ ID NO: 1421 |
| 344 | TTACAGCTAT | SEQ ID NO: 446 | ACGCTAATAT | SEQ ID NO: 1422 |
| 345 | TCGTTGGTCC | SEQ ID NO: 447 | AATACGTTGT | SEQ ID NO: 1423 |
| 346 | GAATGTTGAA | SEQ ID NO: 448 | TCGGCTGATG | SEQ ID NO: 1424 |
| 347 | CGCTACCACT | SEQ ID NO: 449 | TTGTACTAGG | SEQ ID NO: 1425 |
| 348 | TCGTCCAGCA | SEQ ID NO: 450 | AGTTAAGGTC | SEQ ID NO: 1426 |
| 349 | GAGTACAGCC | SEQ ID NO: 451 | CTTCCAGGCA | SEQ ID NO: 1427 |
| 350 | GAGTTAGAAT | SEQ ID NO: 452 | CCGAATAGGC | SEQ ID NO: 1428 |
| 351 | CAGTGTGAGA | SEQ ID NO: 453 | ACCTTGGTAA | SEQ ID NO: 1429 |
| 352 | AGAGTTCTGG | SEQ ID NO: 454 | TGATCCTACT | SEQ ID NO: 1430 |
| 353 | GCACCTATGG | SEQ ID NO: 455 | TGGAACGCTC | SEQ ID NO: 1431 |
| 354 | TTGCGTTCTC | SEQ ID NO: 456 | CCGTTCACCG | SEQ ID NO: 1432 |
| 355 | TGTACAGAAG | SEQ ID NO: 457 | ACAGTCATTG | SEQ ID NO: 1433 |
| 356 | GGCGTCATTC | SEQ ID NO: 458 | TCACCATTCT | SEQ ID NO: 1434 |
| 357 | CATATCAGGT | SEQ ID NO: 459 | GGTTCCACTT | SEQ ID NO: 1435 |
| 358 | GTATGTCCGC | SEQ ID NO: 460 | TCCTGTGCCG | SEQ ID NO: 1436 |
| 359 | TGCGGCTACC | SEQ ID NO: 461 | TGTTGTGCAT | SEQ ID NO: 1437 |
| 360 | GGCCTGCGAC | SEQ ID NO: 462 | TGAGCTATAA | SEQ ID NO: 1438 |
| 361 | AGCTCCTGCA | SEQ ID NO: 463 | AGTTGCCGGT | SEQ ID NO: 1439 |
| 362 | GCGGTACTGC | SEQ ID NO: 464 | GAGATCACGG | SEQ ID NO: 1440 |
| 363 | CGCGAATGCC | SEQ ID NO: 465 | ACGGCCATAG | SEQ ID NO: 1441 |
| 364 | CCTACAGCGG | SEQ ID NO: 466 | CTCCTCAGTA | SEQ ID NO: 1442 |
| 365 | TATCCTAATT | SEQ ID NO: 467 | CGCCGCAGAG | SEQ ID NO: 1443 |
| 366 | GACACTATTG | SEQ ID NO: 468 | TTGTAACATT | SEQ ID NO: 1444 |
| 367 | TCTATATGAC | SEQ ID NO: 469 | CTAGTGTACC | SEQ ID NO: 1445 |
| 368 | GTTGTGCAGT | SEQ ID NO: 470 | TTATCGCTAG | SEQ ID NO: 1446 |
| 369 | TTAGGCAACT | SEQ ID NO: 471 | GATCAGTATA | SEQ ID NO: 1447 |
| 370 | GCTTACGCGG | SEQ ID NO: 472 | TGGCCATACC | SEQ ID NO: 1448 |
| 371 | GCTAGTCTCA | SEQ ID NO: 473 | TATTCCTCAC | SEQ ID NO: 1449 |
| 372 | GTCGGTGATG | SEQ ID NO: 474 | TGAGATGTGA | SEQ ID NO: 1450 |
| 373 | GAGGAACCTT | SEQ ID NO: 475 | GGCGCAACAA | SEQ ID NO: 1451 |
| 374 | AGCGGAATAA | SEQ ID NO: 476 | CCATGATCGA | SEQ ID NO: 1452 |
| 375 | CTAATGATAC | SEQ ID NO: 477 | CTCTACCTGC | SEQ ID NO: 1453 |
| 376 | TAGCGGCGCT | SEQ ID NO: 478 | TCATCTGGCA | SEQ ID NO: 1454 |
| 377 | GCGGTCTTGA | SEQ ID NO: 479 | GTCGCTGCCT | SEQ ID NO: 1455 |
| 378 | CGCGCTGAGT | SEQ ID NO: 480 | TAACCACCGA | SEQ ID NO: 1456 |
| 379 | CACGGACAGG | SEQ ID NO: 481 | GGACCGCACA | SEQ ID NO: 1457 |
| 380 | GTGCGTACTA | SEQ ID NO: 482 | CCACGTAACA | SEQ ID NO: 1458 |
| 381 | TAGTGTGCGG | SEQ ID NO: 483 | AGTAAGAAGA | SEQ ID NO: 1459 |
| 382 | CGATCTTAGA | SEQ ID NO: 484 | AACAGCATGG | SEQ ID NO: 1460 |
| 383 | GACGGTCAGT | SEQ ID NO: 485 | TAAGCGAGCA | SEQ ID NO: 1461 |
| 384 | TGCCGGCCAT | SEQ ID NO: 486 | TAGCGAGAAC | SEQ ID NO: 1462 |
| 385 | GTTGTCAGTG | SEQ ID NO: 487 | GATCACCTAG | SEQ ID NO: 1463 |
| 386 | GTACCTTGAG | SEQ ID NO: 488 | TGCACACACC | SEQ ID NO: 1464 |
| 387 | GTATTGCTCT | SEQ ID NO: 489 | TGGATCCGAA | SEQ ID NO: 1465 |
| 388 | TAACGTTGCT | SEQ ID NO: 490 | AGAGACCTGC | SEQ ID NO: 1466 |
| 389 | CTCCGCATGA | SEQ ID NO: 491 | CATATTACGA | SEQ ID NO: 1467 |
| 390 | AATACTGCGT | SEQ ID NO: 492 | CCGACTACAG | SEQ ID NO: 1468 |
| 391 | TTGCTTATGC | SEQ ID NO: 493 | TTCGGCTGAG | SEQ ID NO: 1469 |
| 392 | CACCTCTCGG | SEQ ID NO: 494 | ACGGACAGCT | SEQ ID NO: 1470 |
| 393 | CTTGCTCAGT | SEQ ID NO: 495 | ACCTAGTCCT | SEQ ID NO: 1471 |
| 394 | ATCAGGTGAA | SEQ ID NO: 496 | GGAGCAGAGA | SEQ ID NO: 1472 |
| 395 | GTACTTACGT | SEQ ID NO: 497 | TGTCAATAGC | SEQ ID NO: 1473 |
| 396 | GTCGCCGGTG | SEQ ID NO: 498 | CGCAATGCTA | SEQ ID NO: 1474 |
| 397 | AATAGATTAT | SEQ ID NO: 499 | AGCCACTGGC | SEQ ID NO: 1475 |
| 398 | AAGAGTACCG | SEQ ID NO: 500 | AATTCCAATG | SEQ ID NO: 1476 |
| 399 | GAGATACCGT | SEQ ID NO: 501 | TCGCCGTCCA | SEQ ID NO: 1477 |
| 400 | CTGATGTAAC | SEQ ID NO: 502 | CGACATGAAG | SEQ ID NO: 1478 |
| 401 | CAGAGTTCGA | SEQ ID NO: 503 | AGTCATGCAG | SEQ ID NO: 1479 |
| 402 | GATGACATAT | SEQ ID NO: 504 | GGCAGCTGTA | SEQ ID NO: 1480 |
| 403 | TGTCCGTAGG | SEQ ID NO: 505 | ACCGCAGATG | SEQ ID NO: 1481 |
| 404 | CACGTCTAAT | SEQ ID NO: 506 | CAATCGCACA | SEQ ID NO: 1482 |
| 405 | AGCCGTGGTC | SEQ ID NO: 507 | TTGACGCTTC | SEQ ID NO: 1483 |
| 406 | TGTGGTCTCA | SEQ ID NO: 508 | ATTGGTGGTT | SEQ ID NO: 1484 |
| 407 | GAATCCGGAA | SEQ ID NO: 509 | CAACGAAGAT | SEQ ID NO: 1485 |
| 408 | TGTCGGACCA | SEQ ID NO: 510 | AGTATTGCTT | SEQ ID NO: 1486 |
| 409 | AGGTCTGCCG | SEQ ID NO: 511 | GTAAGTATGA | SEQ ID NO: 1487 |
| 410 | CTAGCGGTGG | SEQ ID NO: 512 | ATATGTATCA | SEQ ID NO: 1488 |
| 411 | ACGTTAGTCA | SEQ ID NO: 513 | CATCAAGTAC | SEQ ID NO: 1489 |
| 412 | GAATATTGGT | SEQ ID NO: 514 | TCGATAGCAT | SEQ ID NO: 1490 |
| 413 | GTAAGGCAAC | SEQ ID NO: 515 | GAATCATTGA | SEQ ID NO: 1491 |
| 414 | GACTGCGACA | SEQ ID NO: 516 | CTTGGTTGGA | SEQ ID NO: 1492 |
| 415 | TTATGAACAT | SEQ ID NO: 517 | ACGGTTATGG | SEQ ID NO: 1493 |
| 416 | AACGTCATAT | SEQ ID NO: 518 | CCGTCGCATA | SEQ ID NO: 1494 |
| 417 | GGCGTTCGCT | SEQ ID NO: 519 | GCACACGACC | SEQ ID NO: 1495 |
| 418 | TAGTGTACAT | SEQ ID NO: 520 | ACCTATTCAA | SEQ ID NO: 1496 |
| 419 | GGATCGGCAG | SEQ ID NO: 521 | TAGAGATGAG | SEQ ID NO: 1497 |
| 420 | GTCCGGCTTG | SEQ ID NO: 522 | CTCACGATAG | SEQ ID NO: 1498 |
| 421 | ACCGTGCGGC | SEQ ID NO: 523 | AGACGAGATT | SEQ ID NO: 1499 |
| 422 | TGACTGGCGT | SEQ ID NO: 524 | AACTCCACCG | SEQ ID NO: 1500 |
| 423 | TATCGCGCAC | SEQ ID NO: 525 | CGGCAGCCTC | SEQ ID NO: 1501 |
| 424 | TCGAACGAGT | SEQ ID NO: 526 | ACCACAGAGT | SEQ ID NO: 1502 |
| 425 | AAGGAGCAAT | SEQ ID NO: 527 | ACTAGGACGA | SEQ ID NO: 1503 |
| 426 | GATCGTTCTA | SEQ ID NO: 528 | CCTACGTTCC | SEQ ID NO: 1504 |
| 427 | ATACCTCTGG | SEQ ID NO: 529 | TATTCTTCCG | SEQ ID NO: 1505 |
| 428 | GTGCGCCGTA | SEQ ID NO: 530 | CCTCCTCTGG | SEQ ID NO: 1506 |
| 429 | CGTATTAGCC | SEQ ID NO: 531 | CGGACGTATG | SEQ ID NO: 1507 |
| 430 | TGCGCTCGTA | SEQ ID NO: 532 | GGAACGTAGA | SEQ ID NO: 1508 |
| 431 | ACTAGTTGAA | SEQ ID NO: 533 | ATTGGTATGT | SEQ ID NO: 1509 |
| 432 | GTGGCTCTGT | SEQ ID NO: 534 | TCCGCTTAAT | SEQ ID NO: 1510 |
| 433 | GCCAACGGAT | SEQ ID NO: 535 | TGCAATGCAT | SEQ ID NO: 1511 |
| 434 | GGCAACTTAT | SEQ ID NO: 536 | CTGGCAGCGC | SEQ ID NO: 1512 |
| 435 | CATTAATCTC | SEQ ID NO: 537 | TTCCGCATAG | SEQ ID NO: 1513 |
| 436 | CGCGACACTA | SEQ ID NO: 538 | AACTACAGCA | SEQ ID NO: 1514 |
| 437 | GAGGAATCGC | SEQ ID NO: 539 | GACCTGACCA | SEQ ID NO: 1515 |
| 438 | AGGTGTGATC | SEQ ID NO: 540 | GACAGATTAA | SEQ ID NO: 1516 |
| 439 | AACTCGGACG | SEQ ID NO: 541 | ATCCTCCTGA | SEQ ID NO: 1517 |
| 440 | TTCATGGCGT | SEQ ID NO: 542 | AATCCAATCT | SEQ ID NO: 1518 |
| 441 | TCACTCGTTG | SEQ ID NO: 543 | ACCGGCTACT | SEQ ID NO: 1519 |
| 442 | TGGACTCCGT | SEQ ID NO: 544 | ATTGGCTAGA | SEQ ID NO: 1520 |
| 443 | CTCGGTGCCG | SEQ ID NO: 545 | AATGAGATTG | SEQ ID NO: 1521 |
| 444 | CCTGCAGCAA | SEQ ID NO: 546 | ACTCCTGATG | SEQ ID NO: 1522 |
| 445 | AAGTCGTAAG | SEQ ID NO: 547 | ATCATAATGA | SEQ ID NO: 1523 |
| 446 | GATGCTAGAT | SEQ ID NO: 548 | CTCCTGTTCG | SEQ ID NO: 1524 |
| 447 | GTACTGAGTT | SEQ ID NO: 549 | CATGCCTGGC | SEQ ID NO: 1525 |
| 448 | CTCCGGTCCT | SEQ ID NO: 550 | ATAAGTTCAC | SEQ ID NO: 1526 |
| 449 | TTCACGGATG | SEQ ID NO: 551 | TTAAGACACC | SEQ ID NO: 1527 |
| 450 | CGTAGTGGAT | SEQ ID NO: 552 | CGGCACAGAC | SEQ ID NO: 1528 |
| 451 | GCGTCAGTAT | SEQ ID NO: 553 | TCATGCAACG | SEQ ID NO: 1529 |
| 452 | TGAGTGTTCT | SEQ ID NO: 554 | ATCCGATTAG | SEQ ID NO: 1530 |
| 453 | GTCGCTTCTA | SEQ ID NO: 555 | CAACATCCGA | SEQ ID NO: 1531 |
| 454 | TCTATTGATG | SEQ ID NO: 556 | ATCCTATTCT | SEQ ID NO: 1532 |
| 455 | GGTGTAGTTA | SEQ ID NO: 557 | TGTCGAAGTT | SEQ ID NO: 1533 |
| 456 | TAAGGACTGG | SEQ ID NO: 558 | ACCAAGACCG | SEQ ID NO: 1534 |
| 457 | GTCCACCGGA | SEQ ID NO: 559 | TCGGCACCTG | SEQ ID NO: 1535 |
| 458 | ACGCGTTACC | SEQ ID NO: 560 | CTCGAAGCCT | SEQ ID NO: 1536 |
| 459 | CAGGACGTAC | SEQ ID NO: 561 | CATAGTTAGG | SEQ ID NO: 1537 |
| 460 | AGGTGACCTG | SEQ ID NO: 562 | GGTTGTACTA | SEQ ID NO: 1538 |
| 461 | GTTACTCATA | SEQ ID NO: 563 | TTAGGAGCCG | SEQ ID NO: 1539 |
| 462 | CACGCGGTTA | SEQ ID NO: 564 | AATGGCATGC | SEQ ID NO: 1540 |
| 463 | GACTATGCTG | SEQ ID NO: 565 | TGATGATTCC | SEQ ID NO: 1541 |
| 464 | GAAGAGTGCT | SEQ ID NO: 566 | TATAGCCGCA | SEQ ID NO: 1542 |
| 465 | TGTCCGTCTA | SEQ ID NO: 567 | ATTAAGTACC | SEQ ID NO: 1543 |
| 466 | TGTTGATGGC | SEQ ID NO: 568 | CACTATTGAT | SEQ ID NO: 1544 |
| 467 | ACCATGGACG | SEQ ID NO: 569 | AGAGCCTTGA | SEQ ID NO: 1545 |
| 468 | GCACAGGCGA | SEQ ID NO: 570 | GGCGGCGGTT | SEQ ID NO: 1546 |
| 469 | TGATCAGGTT | SEQ ID NO: 571 | GTATCCTTCG | SEQ ID NO: 1547 |
| 470 | GAGAGGTCCG | SEQ ID NO: 572 | GTGCCGCTAA | SEQ ID NO: 1548 |
| 471 | AGGCCACGAT | SEQ ID NO: 573 | ATTACGAAGG | SEQ ID NO: 1549 |
| 472 | CCTTGGTGCA | SEQ ID NO: 574 | AACTGATTGA | SEQ ID NO: 1550 |
| 473 | CCTTATGATC | SEQ ID NO: 575 | ATAGCTTCCA | SEQ ID NO: 1551 |
| 474 | GCGTCTAACC | SEQ ID NO: 576 | TGTATCATCA | SEQ ID NO: 1552 |
| 475 | CTAGACGATG | SEQ ID NO: 577 | TAACCATTGG | SEQ ID NO: 1553 |
| 476 | CCTGCGCGGA | SEQ ID NO: 578 | TAATAGCTGC | SEQ ID NO: 1554 |
| 477 | AGGCGCTGAA | SEQ ID NO: 579 | GACAATGGCA | SEQ ID NO: 1555 |
| 478 | CGTTCCGTTA | SEQ ID NO: 580 | CTCATCCGTT | SEQ ID NO: 1556 |
| 479 | ATCGAAGTAT | SEQ ID NO: 581 | CTCTCAGCGG | SEQ ID NO: 1557 |
| 480 | ATACCAATAC | SEQ ID NO: 582 | ACATATCATG | SEQ ID NO: 1558 |
| 481 | GAGTGCATCG | SEQ ID NO: 583 | GCCAATCGAC | SEQ ID NO: 1559 |
| 482 | GCTGACTCCG | SEQ ID NO: 584 | GCCTACGGTG | SEQ ID NO: 1560 |
| 483 | GTTGCGTCTT | SEQ ID NO: 585 | CCGATCATAG | SEQ ID NO: 1561 |
| 484 | TATGGCCTCC | SEQ ID NO: 586 | ATTACTAGAC | SEQ ID NO: 1562 |
| 485 | GGTGTATGGC | SEQ ID NO: 587 | CGGAGAAGTG | SEQ ID NO: 1563 |
| 486 | GTCGTAGCAA | SEQ ID NO: 588 | TCGCTGAGTG | SEQ ID NO: 1564 |
| 487 | GAAGATCCTC | SEQ ID NO: 589 | GGAATACTCT | SEQ ID NO: 1565 |
| 488 | GTCCTCGCGG | SEQ ID NO: 590 | GCATTGGTCA | SEQ ID NO: 1566 |
| 489 | TTCGAACTCC | SEQ ID NO: 591 | ATCGCCTGAT | SEQ ID NO: 1567 |
| 490 | TATGGCAGCG | SEQ ID NO: 592 | ATTCAAGCAC | SEQ ID NO: 1568 |
| 491 | CTCACAAGGC | SEQ ID NO: 593 | GGCGGCAAGC | SEQ ID NO: 1569 |
| 492 | GGACGTGCGC | SEQ ID NO: 594 | TATAGAATGT | SEQ ID NO: 1570 |
| 493 | CACTCCGTTG | SEQ ID NO: 595 | CCACAGCGAC | SEQ ID NO: 1571 |
| 494 | GCCGTGATCT | SEQ ID NO: 596 | TACGAATGCA | SEQ ID NO: 1572 |
| 495 | AACTCCGGAT | SEQ ID NO: 597 | AGCCATCATA | SEQ ID NO: 1573 |
| 496 | TGCGGAGCGG | SEQ ID NO: 598 | AGCTGACTGC | SEQ ID NO: 1574 |
| 497 | GTCGGCTGCA | SEQ ID NO: 599 | GGTGGACCTG | SEQ ID NO: 1575 |
| 498 | CAATAGGAGA | SEQ ID NO: 600 | GGCTTAACCA | SEQ ID NO: 1576 |
| 499 | CTGTGACGGT | SEQ ID NO: 601 | GGAGCCTAAT | SEQ ID NO: 1577 |
| 500 | CCACGCGGCT | SEQ ID NO: 602 | ACAAGAGCAG | SEQ ID NO: 1578 |
| 501 | TCGGAGAGCC | SEQ ID NO: 603 | CGCCTATGAA | SEQ ID NO: 1579 |
| 502 | GAAGGCACGA | SEQ ID NO: 604 | GGTCGCTAAT | SEQ ID NO: 1580 |
| 503 | CTCTGCTCGG | SEQ ID NO: 605 | CTCTATCACG | SEQ ID NO: 1581 |
| 504 | GCTCCAGGCC | SEQ ID NO: 606 | GACATGACAC | SEQ ID NO: 1582 |
| 505 | GCTCGCGCCT | SEQ ID NO: 607 | TCTAAGTAAG | SEQ ID NO: 1583 |
| 506 | GTGGAGAGAT | SEQ ID NO: 608 | TTGTGCTTAG | SEQ ID NO: 1584 |
| 507 | CTGCGCGCCG | SEQ ID NO: 609 | TTCTAGTGCC | SEQ ID NO: 1585 |
| 508 | AGACATAGGT | SEQ ID NO: 610 | ACTTAGGACT | SEQ ID NO: 1586 |
| 509 | AATGAGTCAT | SEQ ID NO: 611 | TAAGCCATCT | SEQ ID NO: 1587 |
| 510 | TTGCTATCCG | SEQ ID NO: 612 | CTAGACTTCT | SEQ ID NO: 1588 |
| 511 | TCATGAGCTT | SEQ ID NO: 613 | AGTATCTATT | SEQ ID NO: 1589 |
| 512 | GCGCATGACT | SEQ ID NO: 614 | CTGGTTGTAA | SEQ ID NO: 1590 |
| 513 | TCCATATGTT | SEQ ID NO: 615 | CCGCAGACCT | SEQ ID NO: 1591 |
| 514 | CGAGTCCGAA | SEQ ID NO: 616 | CCGCACCAAC | SEQ ID NO: 1592 |
| 515 | CTCGAGCAGA | SEQ ID NO: 617 | AGTTGGCAGC | SEQ ID NO: 1593 |
| 516 | GCGTTAGTTG | SEQ ID NO: 618 | TTCGGCTCCT | SEQ ID NO: 1594 |
| 517 | ATAATCTAGA | SEQ ID NO: 619 | CAATGTATGG | SEQ ID NO: 1595 |
| 518 | ATCTGTCCTT | SEQ ID NO: 620 | CAACTATATA | SEQ ID NO: 1596 |
| 519 | GAACCGCGCG | SEQ ID NO: 621 | CCACTTGTGC | SEQ ID NO: 1597 |
| 520 | GTGATTCGGA | SEQ ID NO: 622 | CAAGGCGACT | SEQ ID NO: 1598 |
| 52 | GCTCAGAGTA | SEQ ID NO: 623 | GCAACCTGCA | SEQ ID NO: 1599 |
| 522 | GAAGACAGTT | SEQ ID NO: 624 | GCAGCCGCGC | SEQ ID NO: 1600 |
| 523 | TATGTATCGC | SEQ ID NO: 625 | ATTGTGCCTG | SEQ ID NO: 1601 |
| 524 | GTCTGTTGCC | SEQ ID NO: 626 | TCCATGAGAG | SEQ ID NO: 1602 |
| 525 | TCCGTAGAGG | SEQ ID NO: 627 | ATTGATTAGG | SEQ ID NO: 1603 |
| 526 | TGAGTACGTG | SEQ ID NO: 628 | CGCCATGATT | SEQ ID NO: 1604 |
| 527 | TGTCCTGTGT | SEQ ID NO: 629 | ACGGATTAAG | SEQ ID NO: 1605 |
| 528 | GCGACGGCCG | SEQ ID NO: 630 | GTAGAAGTTG | SEQ ID NO: 1606 |
| 529 | TGCCTGAGGT | SEQ ID NO: 631 | AAGGTTCCGC | SEQ ID NO: 1607 |
| 530 | TACATCCTAT | SEQ ID NO: 632 | CGCTCAGCCT | SEQ ID NO: 1608 |
| 531 | GCGCTGCCGT | SEQ ID NO: 633 | TCACATGTAA | SEQ ID NO: 1609 |
| 532 | GCTTGCGGCC | SEQ ID NO: 634 | GAGATCCTGA | SEQ ID NO: 1610 |
| 533 | GCTTCTTCAT | SEQ ID NO: 635 | GTTGTATTAT | SEQ ID NO: 1611 |
| 534 | GTTATTAAGG | SEQ ID NO: 636 | GGACCTATCC | SEQ ID NO: 1612 |
| 535 | TCGTGAGTGG | SEQ ID NO: 637 | AACCTCGTAA | SEQ ID NO: 1613 |
| 536 | CTGTAACGTA | SEQ ID NO: 638 | CGCAGCTACT | SEQ ID NO: 1614 |
| 537 | CACATCACCA | SEQ ID NO: 639 | CATCTTCATT | SEQ ID NO: 1615 |
| 538 | GCAGTCCTAG | SEQ ID NO: 640 | GTGGTCCTCG | SEQ ID NO: 1616 |
| 539 | CCTTGGCGAG | SEQ ID NO: 641 | AAGAATGTAG | SEQ ID NO: 1617 |
| 540 | CGCGGTCTTG | SEQ ID NO: 642 | ACGACTTGTT | SEQ ID NO: 1618 |
| 541 | CTGCGTCAAG | SEQ ID NO: 643 | TCAATAGCTC | SEQ ID NO: 1619 |
| 542 | AGGATACATA | SEQ ID NO: 644 | GTGGCATTCT | SEQ ID NO: 1620 |
| 543 | CTGAGTTGTC | SEQ ID NO: 645 | CAGCATCTGC | SEQ ID NO: 1621 |
| 544 | GCGGCGAGTT | SEQ ID NO: 646 | GGTAGAGGTC | SEQ ID NO: 1622 |
| 545 | GGTCTTACCT | SEQ ID NO: 647 | CGGACTAGCT | SEQ ID NO: 1623 |
| 546 | TACTCTCCTG | SEQ ID NO: 648 | ACTATCTCTA | SEQ ID NO: 1624 |
| 547 | CGCTCTATGA | SEQ ID NO: 649 | ATTCGCATTG | SEQ ID NO: 1625 |
| 548 | TTGAGGCATT | SEQ ID NO: 650 | GACTTCCAGG | SEQ ID NO: 1626 |
| 549 | GTAGGCGTTC | SEQ ID NO: 651 | GGCTTGTAAG | SEQ ID NO: 1627 |
| 550 | CTCGCTAGGT | SEQ ID NO: 652 | GTTCACGATT | SEQ ID NO: 1628 |
| 551 | GCAGGTTCTA | SEQ ID NO: 653 | GGTTGACATT | SEQ ID NO: 1629 |
| 552 | GGTCGTAGAA | SEQ ID NO: 654 | GAATCGTAGC | SEQ ID NO: 1630 |
| 553 | GGTTGTCTCC | SEQ ID NO: 655 | TGATGCCGCC | SEQ ID NO: 1631 |
| 554 | CACATGTCGC | SEQ ID NO: 656 | TACCAACTGC | SEQ ID NO: 1632 |
| 555 | GTCGTCCGGT | SEQ ID NO: 657 | CATAGCCGTC | SEQ ID NO: 1633 |
| 556 | GTGGAAGTAA | SEQ ID NO: 658 | GTGGCCTCGC | SEQ ID NO: 1634 |
| 557 | GCACGTACAT | SEQ ID NO: 659 | GTCATTGGAT | SEQ ID NO: 1635 |
| 558 | TCGAGTATGC | SEQ ID NO: 660 | TCAGAGGTAG | SEQ ID NO: 1636 |
| 559 | AGCTCGTAGT | SEQ ID NO: 661 | GTTACCGTCC | SEQ ID NO: 1637 |
| 560 | CTCCGTTATC | SEQ ID NO: 662 | CGGTAGACGC | SEQ ID NO: 1638 |
| 561 | CCTCTACTTG | SEQ ID NO: 663 | ATTCGGAGAC | SEQ ID NO: 1639 |
| 562 | GGTGGCGTCT | SEQ ID NO: 664 | TGGACAAGCG | SEQ ID NO: 1640 |
| 563 | CGCCGAGTCA | SEQ ID NO: 665 | ATAGCAATGG | SEQ ID NO: 1641 |
| 564 | GTCTGCCACT | SEQ ID NO: 666 | TCGCTGTTAG | SEQ ID NO: 1642 |
| 565 | GCGTTCGACG | SEQ ID NO: 667 | CTCTAGCCGT | SEQ ID NO: 1643 |
| 566 | CAGTCTTGTT | SEQ ID NO: 668 | GTCATCGCTT | SEQ ID NO: 1644 |
| 567 | GGTATCTCCT | SEQ ID NO: 669 | CCAAGTCTGC | SEQ ID NO: 1645 |
| 568 | CTGTACTCAC | SEQ ID NO: 670 | TCTCACCGCA | SEQ ID NO: 1646 |
| 569 | TTACGCGTGA | SEQ ID NO: 671 | ACCGATCCAT | SEQ ID NO: 1647 |
| 570 | AGGTTCTCGT | SEQ ID NO: 672 | GGCCTTCAGC | SEQ ID NO: 1648 |
| 571 | CTTGCGATCC | SEQ ID NO: 673 | TGTGAACGAT | SEQ ID NO: 1649 |
| 572 | TGAATCGTGG | SEQ ID NO: 674 | ATACCGTATG | SEQ ID NO: 1650 |
| 573 | TCGACGTGGA | SEQ ID NO: 675 | TGGAGTGGTG | SEQ ID NO: 1651 |
| 574 | GGCAAGGTAC | SEQ ID NO: 676 | GAACTATCAC | SEQ ID NO: 1652 |
| 575 | CTCAGCTGCC | SEQ ID NO: 677 | TACACTTGTC | SEQ ID NO: 1653 |
| 576 | GCCTGTCAGA | SEQ ID NO: 678 | TCATCTATCC | SEQ ID NO: 1654 |
| 577 | AGCGACATCA | SEQ ID NO: 679 | ATTAATATCT | SEQ ID NO: 1655 |
| 578 | GCGAGAATAT | SEQ ID NO: 680 | CAATGCTTAA | SEQ ID NO: 1656 |
| 579 | GGCTAGCTCA | SEQ ID NO: 681 | TCACATTCTA | SEQ ID NO: 1657 |
| 580 | TATTCGGTAC | SEQ ID NO: 682 | TTCCAGCAAC | SEQ ID NO: 1658 |
| 581 | TTGGTAGGAC | SEQ ID NO: 683 | GGACGGCATC | SEQ ID NO: 1659 |
| 582 | CAATCGTGGT | SEQ ID NO: 684 | AACGTAACTC | SEQ ID NO: 1660 |
| 583 | CGCTGGCGCG | SEQ ID NO: 685 | ATGGTCCATC | SEQ ID NO: 1661 |
| 584 | CTGGTGCGTT | SEQ ID NO: 686 | GACAATCCGT | SEQ ID NO: 1662 |
| 585 | GCGACGCTAG | SEQ ID NO: 687 | GGAATCCGAT | SEQ ID NO: 1663 |
| 586 | GCGCTGGTCT | SEQ ID NO: 688 | TCCTCGAGTC | SEQ ID NO: 1664 |
| 587 | TGTCTTCTAA | SEQ ID NO: 689 | TCGAAGAGTA | SEQ ID NO: 1665 |
| 588 | TCATACCGGT | SEQ ID NO: 690 | AGCGCGGCAA | SEQ ID NO: 1666 |
| 589 | GCTTCGTGGC | SEQ ID NO: 691 | TAACCGACCG | SEQ ID NO: 1667 |
| 590 | TGGAGCACAT | SEQ ID NO: 692 | CCATCCTGGA | SEQ ID NO: 1668 |
| 591 | GGCTATCAAC | SEQ ID NO: 693 | CTGCAACCAA | SEQ ID NO: 1669 |
| 592 | TTATTACGTA | SEQ ID NO: 694 | CCAGCTGCCT | SEQ ID NO: 1670 |
| 593 | AGGCAGCTAC | SEQ ID NO: 695 | GACGCACTAT | SEQ ID NO: 1671 |
| 594 | GCTGTCGGCG | SEQ ID NO: 696 | GTCCACGGCT | SEQ ID NO: 1672 |
| 595 | ATACTGTGGC | SEQ ID NO: 697 | CTCAGCACTA | SEQ ID NO: 1673 |
| 596 | ATGAAGACGG | SEQ ID NO: 698 | AGTAACGGTG | SEQ ID NO: 1674 |
| 597 | ATCGTCTTAA | SEQ ID NO: 699 | TCCAGCAATG | SEQ ID NO: 1675 |
| 598 | AATGTCTGTA | SEQ ID NO: 700 | CCAACCATGC | SEQ ID NO: 1676 |
| 599 | GGTCAGCGTG | SEQ ID NO: 701 | TTCGGTCAAT | SEQ ID NO: 1677 |
| 600 | TTAGGTCCTA | SEQ ID NO: 702 | AATCAGGTCT | SEQ ID NO: 1678 |
| 601 | GACCGTGAAT | SEQ ID NO: 703 | TACGTGGACG | SEQ ID NO: 1679 |
| 602 | ACTTCTGTCC | SEQ ID NO: 704 | CCTGTGTCGA | SEQ ID NO: 1680 |
| 603 | ATCGGCGAAC | SEQ ID NO: 705 | CTCGAGTGTA | SEQ ID NO: 1681 |
| 604 | GCAAGCTTAT | SEQ ID NO: 706 | TGGATCCTTC | SEQ ID NO: 1682 |
| 605 | TAGCTCAGGC | SEQ ID NO: 707 | TAGGTAGAGT | SEQ ID NO: 1683 |
| 606 | GCTGTTGCTG | SEQ ID NO: 708 | GACTTGTGTC | SEQ ID NO: 1684 |
| 607 | GTGAATGGAG | SEQ ID NO: 709 | CTTGAACTTA | SEQ ID NO: 1685 |
| 608 | GTCTAAGCAC | SEQ ID NO: 710 | TCAAGCCGAG | SEQ ID NO: 1686 |
| 609 | ATAGCGCGAT | SEQ ID NO: 711 | TATGGACCAG | SEQ ID NO: 1687 |
| 610 | GCTGAGGATA | SEQ ID NO: 712 | GACCTTACTT | SEQ ID NO: 1688 |
| 611 | ATCTCCTAAG | SEQ ID NO: 713 | CGGCTCGGCG | SEQ ID NO: 1689 |
| 612 | GTCCGAGCAG | SEQ ID NO: 714 | TCGCATGAAG | SEQ ID NO: 1690 |
| 613 | TCGAGGTGAT | SEQ ID NO: 715 | GGACGCATTA | SEQ ID NO: 1691 |
| 614 | GATACGTGCG | SEQ ID NO: 716 | TGAACAACTT | SEQ ID NO: 1692 |
| 615 | ATTGTATACT | SEQ ID NO: 717 | ACCACTGGCT | SEQ ID NO: 1693 |
| 616 | CGTTAACTGA | SEQ ID NO: 718 | AGTGAGCTGT | SEQ ID NO: 1694 |
| 617 | ACTCGTATGC | SEQ ID NO: 719 | TCCGTTCGTT | SEQ ID NO: 1695 |
| 618 | GTCCTGTCAA | SEQ ID NO: 720 | TCTCCACAAC | SEQ ID NO: 1696 |
| 619 | TAGATCGTCC | SEQ ID NO: 721 | ATAGTGAATC | SEQ ID NO: 1697 |
| 620 | CGTCCGTGGT | SEQ ID NO: 722 | CCTTGCTAGA | SEQ ID NO: 1698 |
| 621 | TACTGTCTGT | SEQ ID NO: 723 | CGATGCCACG | SEQ ID NO: 1699 |
| 622 | GTGGTACACA | SEQ ID NO: 724 | TGACTCCGGC | SEQ ID NO: 1700 |
| 623 | CGACCGACGT | SEQ ID NO: 725 | AACATTAGGA | SEQ ID NO: 1701 |
| 624 | TCGTGCCTAT | SEQ ID NO: 726 | CCATCGTCAA | SEQ ID NO: 1702 |
| 625 | GCATGGCTAG | SEQ ID NO: 727 | CTGACACTCC | SEQ ID NO: 1703 |
| 626 | ATCCGTAGGA | SEQ ID NO: 728 | GCCATCAACA | SEQ ID NO: 1704 |
| 627 | CTCTAAGAGA | SEQ ID NO: 729 | ATTCTAGTAG | SEQ ID NO: 1705 |
| 628 | CCTCCTTAAG | SEQ ID NO: 730 | ATATCGCACG | SEQ ID NO: 1706 |
| 629 | AATTACGTTA | SEQ ID NO: 731 | AAGATCCGAC | SEQ ID NO: 1707 |
| 630 | GCAGTCACGT | SEQ ID NO: 732 | CCGTATTCGA | SEQ ID NO: 1708 |
| 631 | AAGGCGCATC | SEQ ID NO: 733 | GCATACCTCG | SEQ ID NO: 1709 |
| 632 | CTGGATGGCG | SEQ ID NO: 734 | CGACGACCTG | SEQ ID NO: 1710 |
| 633 | CTAAGGTCGA | SEQ ID NO: 735 | GTCATAAGAA | SEQ ID NO: 1711 |
| 634 | AAGATGAGGT | SEQ ID NO: 736 | GTCAGACGCT | SEQ ID NO: 1712 |
| 635 | GAGTCGCAGT | SEQ ID NO: 737 | TCGAGCTAGC | SEQ ID NO: 1713 |
| 636 | CGGCGTTGTT | SEQ ID NO: 738 | CATACCAGCG | SEQ ID NO: 1714 |
| 637 | GGAGTGACTC | SEQ ID NO: 739 | CACGCACATA | SEQ ID NO: 1715 |
| 638 | CGTAGTGTTG | SEQ ID NO: 740 | CCTCGGTGAC | SEQ ID NO: 1716 |
| 639 | CGTCTGCATA | SEQ ID NO: 741 | CCGTTCGATT | SEQ ID NO: 1717 |
| 640 | CGATACAAGG | SEQ ID NO: 742 | AATTAGTAGG | SEQ ID NO: 1718 |
| 641 | CGCGCGTTGC | SEQ ID NO: 743 | ACACCTGCGT | SEQ ID NO: 1719 |
| 642 | TAGAGGCGGA | SEQ ID NO: 744 | CGCACCAAGG | SEQ ID NO: 1720 |
| 643 | ATTCTCCGTT | SEQ ID NO: 745 | CTTCGTACCA | SEQ ID NO: 1721 |
| 644 | CCAGCGTATC | SEQ ID NO: 746 | TTCCGACATC | SEQ ID NO: 1722 |
| 645 | AGAACTAGGC | SEQ ID NO: 747 | GATGACAACA | SEQ ID NO: 1723 |
| 646 | TGTGCGAGCC | SEQ ID NO: 748 | CCTGTCAGTT | SEQ ID NO: 1724 |
| 647 | CCAGATCTTC | SEQ ID NO: 749 | TAAGAGCATC | SEQ ID NO: 1725 |
| 648 | GGAAGGCGCC | SEQ ID NO: 750 | CAACGACAAG | SEQ ID NO: 1726 |
| 649 | TGTCTAGGAG | SEQ ID NO: 751 | GACCGCAGAA | SEQ ID NO: 1727 |
| 650 | GTGCCGAGGT | SEQ ID NO: 752 | GATCAACTCA | SEQ ID NO: 1728 |
| 651 | TAGGTCCGAG | SEQ ID NO: 753 | AAGGTCATTA | SEQ ID NO: 1729 |
| 652 | CTGATTAATG | SEQ ID NO: 754 | TTCCGGCGGT | SEQ ID NO: 1730 |
| 653 | GTTAGACGTG | SEQ ID NO: 755 | GTTCGTTAGG | SEQ ID NO: 1731 |
| 654 | CTTCGTCTCT | SEQ ID NO: 756 | ATTCCTGCTC | SEQ ID NO: 1732 |
| 653 | TTATAAGGCC | SEQ ID NO: 757 | GTGACGAACG | SEQ ID NO: 1733 |
| 656 | ATATCGTGAC | SEQ ID NO: 758 | CTAATGAGCA | SEQ ID NO: 1734 |
| 657 | ATCTTGGAGC | SEQ ID NO: 759 | ATGGTGAAGG | SEQ ID NO: 1735 |
| 658 | GAGGTAATTG | SEQ ID NO: 760 | GAACTCCTCG | SEQ ID NO: 1736 |
| 659 | TATTGTTGCA | SEQ ID NO: 761 | AGTTCATCTA | SEQ ID NO: 1737 |
| 660 | CCTATTGTCG | SEQ ID NO: 762 | TTGTCCAACT | SEQ ID NO: 1738 |
| 661 | ACATCTGCTA | SEQ ID NO: 763 | GCCGCTAACG | SEQ ID NO: 1739 |
| 662 | AAGTACCGTG | SEQ ID NO: 764 | TGACGTCCAG | SEQ ID NO: 1740 |
| 663 | AGGCGGTCAC | SEQ ID NO: 765 | GAGATCAGTC | SEQ ID NO: 1741 |
| 664 | AGGATGGTGC | SEQ ID NO: 766 | ACCGCCAGGA | SEQ ID NO: 1742 |
| 665 | GCAGGCCGTT | SEQ ID NO: 767 | GGTAGTTAGT | SEQ ID NO: 1743 |
| 666 | GTTCGTGGCG | SEQ ID NO: 768 | TGCGTTGATT | SEQ ID NO: 1744 |
| 667 | GCAATTGTTG | SEQ ID NO: 769 | GTGGTCGCCT | SEQ ID NO: 1745 |
| 668 | AAGTGGATGG | SEQ ID NO: 770 | AATGACTAGT | SEQ ID NO: 1746 |
| 669 | CTCCTCGTCT | SEQ ID NO: 771 | TCTTCGCACC | SEQ ID NO: 1747 |
| 670 | AATCCGAGTC | SEQ ID NO: 772 | AAGTCCATCT | SEQ ID NO: 1748 |
| 671 | ATCTTATGAA | SEQ ID NO: 773 | ATGAGCGACG | SEQ ID NO: 1749 |
| 672 | TACTGGAGCT | SEQ ID NO: 774 | CCGGTACCAC | SEQ ID NO: 1750 |
| 673 | AAGAGGACAC | SEQ ID NO: 775 | GCGCATAATG | SEQ ID NO: 1751 |
| 674 | CTTCACAGGT | SEQ ID NO: 776 | GCATTAGGTC | SEQ ID NO: 1752 |
| 675 | TCGGAATGCT | SEQ ID NO: 777 | TATCATCTTA | SEQ ID NO: 1753 |
| 676 | GACGTGGATT | SEQ ID NO: 778 | TTCGACGTTA | SEQ ID NO: 1754 |
| 677 | AGAGGTGGTG | SEQ ID NO: 779 | GAGACAGAGA | SEQ ID NO: 1755 |
| 678 | CGCTACACAC | SEQ ID NO: 780 | TCGCTACATA | SEQ ID NO: 1756 |
| 679 | GTTCTAGTCT | SEQ ID NO: 781 | CCAATGCTAT | SEQ ID NO: 1757 |
| 680 | ACAGGCTCTT | SEQ ID NO: 782 | GTAACGCTCA | SEQ ID NO: 1758 |
| 681 | CTCTCCTATA | SEQ ID NO: 783 | ATCCACACTC | SEQ ID NO: 1759 |
| 682 | AGGTATAGAT | SEQ ID NO: 784 | CTTAACCAGG | SEQ ID NO: 1760 |
| 683 | CTTCTCTGCG | SEQ ID NO: 785 | TACTAAGCTA | SEQ ID NO: 1761 |
| 684 | TCTGTCTTGC | SEQ ID NO: 786 | GTCCTCTAGT | SEQ ID NO: 1762 |
| 685 | GTGATGGTCG | SEQ ID NO: 787 | CGATATGTAT | SEQ ID NO: 1763 |
| 686 | CTGGATCTCA | SEQ ID NO: 788 | CATTAGCTAT | SEQ ID NO: 1764 |
| 687 | GCTATTCTAC | SEQ ID NO: 789 | GCCGTATGAT | SEQ ID NO: 1765 |
| 688 | TCCTCAGCTG | SEQ ID NO: 790 | AGCAAGGCCT | SEQ ID NO: 1766 |
| 689 | ATAAGGCAGG | SEQ ID NO: 791 | GACCATTGAA | SEQ ID NO: 1767 |
| 690 | ATAAGTCGTT | SEQ ID NO: 792 | GTCACGTAGC | SEQ ID NO: 1768 |
| 691 | TCGTTATACT | SEQ ID NO: 793 | CGTTATCACC | SEQ ID NO: 1769 |
| 692 | TTGGTCTTAT | SEQ ID NO: 794 | TCACTTGGCT | SEQ ID NO: 1770 |
| 693 | AAGGTCTGAT | SEQ ID NO: 795 | GTATTCTACT | SEQ ID NO: 1771 |
| 694 | GACATCTGCC | SEQ ID NO: 796 | GATGCATAAT | SEQ ID NO: 1772 |
| 695 | AGGCTCACTT | SEQ ID NO: 797 | GTGGCATCAG | SEQ ID NO: 1773 |
| 696 | CTATTCACAT | SEQ ID NO: 798 | ATGCGCCTCA | SEQ ID NO: 1774 |
| 697 | AGCACTATGT | SEQ ID NO: 799 | CGATGTCAAT | SEQ ID NO: 1775 |
| 698 | CGGCTACCGA | SEQ ID NO: 800 | ATAACATGGA | SEQ ID NO: 1776 |
| 699 | GCCGTGTAGT | SEQ ID NO: 801 | TGCATTAACG | SEQ ID NO: 1777 |
| 700 | GCGTCAAGAG | SEQ ID NO: 802 | TACCACTACA | SEQ ID NO: 1778 |
| 701 | GAGGAAGACC | SEQ ID NO: 803 | CAACATTAGG | SEQ ID NO: 1779 |
| 702 | ACGTCTGTTG | SEQ ID NO: 804 | GTCCTTGACT | SEQ ID NO: 1780 |
| 703 | AGGCGATAGG | SEQ ID NO: 805 | GTGCTACTGA | SEQ ID NO: 1781 |
| 704 | TGTTGTCGTA | SEQ ID NO: 806 | TCAGGCAGCC | SEQ ID NO: 1782 |
| 705 | ACCTAGGCAC | SEQ ID NO: 807 | CAGGCGATGA | SEQ ID NO: 1783 |
| 706 | CGTCTTCAGG | SEQ ID NO: 808 | TTAGTAGGTT | SEQ ID NO: 1784 |
| 707 | AGGCTTCAAT | SEQ ID NO: 809 | GAACGACGGC | SEQ ID NO: 1785 |
| 708 | ACTATGCTCC | SEQ ID NO: 810 | AACGCTCTAG | SEQ ID NO: 1786 |
| 709 | GTCATCTTAG | SEQ ID NO: 811 | CGCGCCATCT | SEQ ID NO: 1787 |
| 710 | CTCGATGTGT | SEQ ID NO: 812 | CAGTCCTACT | SEQ ID NO: 1788 |
| 711 | AGAGCGGCTT | SEQ ID NO: 813 | CGGAACGCAA | SEQ ID NO: 1789 |
| 712 | GCGGATGTGA | SEQ ID NO: 814 | GGAGTGATGT | SEQ ID NO: 1790 |
| 713 | CTATACGGAC | SEQ ID NO: 815 | TGCTAGGATC | SEQ ID NO: 1791 |
| 714 | CTGTCAGACT | SEQ ID NO: 816 | TACGCTAGCT | SEQ ID NO: 1792 |
| 715 | GAAGAGGTGC | SEQ ID NO: 817 | GGCGACGCTG | SEQ ID NO: 1793 |
| 716 | GACCTATGTA | SEQ ID NO: 818 | CCGCGCACTT | SEQ ID NO: 1794 |
| 717 | GAATAAGGCT | SEQ ID NO: 819 | CAGGATAGAT | SEQ ID NO: 1795 |
| 718 | GAGGCATGCA | SEQ ID NO: 820 | GTAGCTTAGA | SEQ ID NO: 1796 |
| 719 | CCATGAGGAC | SEQ ID NO: 821 | GGAGAGCCGA | SEQ ID NO: 1797 |
| 720 | GAGTAGTCTG | SEQ ID NO: 822 | GATAATGCGA | SEQ ID NO: 1798 |
| 721 | CTGTGAGAGG | SEQ ID NO: 823 | GACCAGTAAT | SEQ ID NO: 1799 |
| 722 | GTTGGATATA | SEQ ID NO: 824 | TGGCATCTGG | SEQ ID NO: 1800 |
| 723 | AGTGCGAGTA | SEQ ID NO: 825 | ATAATATTGG | SEQ ID NO: 1801 |
| 724 | CGTGGACAAT | SEQ ID NO: 826 | CTAGCAGACA | SEQ ID NO: 1802 |
| 725 | ATCCGTATAC | SEQ ID NO: 827 | ATTACAGTGC | SEQ ID NO: 1803 |
| 726 | TACTGCGTGA | SEQ ID NO: 828 | ACTCGGCGTG | SEQ ID NO: 1804 |
| 727 | CGTCATCGAC | SEQ ID NO: 829 | TACGTTAGGC | SEQ ID NO: 1805 |
| 728 | CTGTCTACCT | SEQ ID NO: 830 | TATAAGTCCG | SEQ ID NO: 1806 |
| 729 | GGAGGACTAG | SEQ ID NO: 831 | GGAATTACGG | SEQ ID NO: 1807 |
| 730 | CAAGGCCTCA | SEQ ID NO: 832 | GACGATACAT | SEQ ID NO: 1808 |
| 731 | GAGGTATGTT | SEQ ID NO: 833 | GATAGCCAAG | SEQ ID NO: 1809 |
| 732 | TGGTACATAC | SEQ ID NO: 834 | TGAGCTCTGC | SEQ ID NO: 1810 |
| 733 | CTTCGAACAT | SEQ ID NO: 835 | TGCGCAGAAT | SEQ ID NO: 1811 |
| 734 | TCTTGACTGT | SEQ ID NO: 836 | GCCTTCCTGC | SEQ ID NO: 1812 |
| 735 | AAGTGATGCG | SEQ ID NO: 837 | GAGCGACCTG | SEQ ID NO: 1813 |
| 736 | ACACACAGGC | SEQ ID NO: 838 | GCAGACGCCA | SEQ ID NO: 1814 |
| 737 | ACTTCGGAGG | SEQ ID NO: 839 | CGACTAGGTA | SEQ ID NO: 1815 |
| 738 | GATGGACGTT | SEQ ID NO: 840 | CAATCTGTGC | SEQ ID NO: 1816 |
| 739 | CGGTTGTCTT | SEQ ID NO: 841 | GTCCATTACG | SEQ ID NO: 1817 |
| 740 | TCTCCGATGG | SEQ ID NO: 842 | AGATTGAAGT | SEQ ID NO: 1818 |
| 741 | ACAAGGCTTA | SEQ ID NO: 843 | GTTCAACGAC | SEQ ID NO: 1819 |
| 742 | TGCATCTCGT | SEQ ID NO: 844 | CGTAATGTCC | SEQ ID NO: 1820 |
| 743 | CGAGTTGGAT | SEQ ID NO: 845 | GCCAGTACGG | SEQ ID NO: 1821 |
| 744 | TCTGGCTATT | SEQ ID NO: 846 | CATTGTCTTA | SEQ ID NO: 1822 |
| 745 | CTGTATTAAG | SEQ ID NO: 847 | CGTAGATCGC | SEQ ID NO: 1823 |
| 746 | CGTGCGCATC | SEQ ID NO: 848 | CTTAGCCTCC | SEQ ID NO: 1824 |
| 747 | TGAGGCTTAG | SEQ ID NO: 849 | GAACCACAGG | SEQ ID NO: 1825 |
| 748 | AGCAGGAGGC | SEQ ID NO: 850 | AAGGTATATC | SEQ ID NO: 1826 |
| 749 | GCGATATGTA | SEQ ID NO: 851 | GTATGCAATG | SEQ ID NO: 1827 |
| 750 | CGTGAAGTTC | SEQ ID NO: 852 | TGCAACCGTG | SEQ ID NO: 1828 |
| 751 | CAAGCGTCAG | SEQ ID NO: 853 | ACACCGTCGG | SEQ ID NO: 1829 |
| 752 | AGGCGGATGC | SEQ ID NO: 854 | GGCCAAGTGA | SEQ ID NO: 1830 |
| 753 | ATACAGCGTT | SEQ ID NO: 855 | CAAGACTCTC | SEQ ID NO: 1831 |
| 754 | CCATGGCTCA | SEQ ID NO: 856 | GAAGTAGCAT | SEQ ID NO: 1832 |
| 755 | GTAGGCTCAG | SEQ ID NO: 857 | GCAGGCAAGG | SEQ ID NO: 1833 |
| 756 | CTAGTGTCTT | SEQ ID NO: 858 | TCTGGTCAAC | SEQ ID NO: 1834 |
| 757 | GACGTCTCAC | SEQ ID NO: 859 | GCGTAACACA | SEQ ID NO: 1835 |
| 758 | ACACATACAG | SEQ ID NO: 860 | AATATCAGCA | SEQ ID NO: 1836 |
| 759 | ATAGGCAATA | SEQ ID NO: 861 | ACAGGATACC | SEQ ID NO: 1837 |
| 760 | GTAGAGCGCG | SEQ ID NO: 862 | CTAATGCATA | SEQ ID NO: 1838 |
| 761 | GGTATACAGC | SEQ ID NO: 863 | TGTGTAACTG | SEQ ID NO: 1839 |
| 762 | AGTCTAGTTC | SEQ ID NO: 864 | CCTGTGATAC | SEQ ID NO: 1840 |
| 763 | CTACAAGCGT | SEQ ID NO: 865 | AACGTCCAGT | SEQ ID NO: 1841 |
| 764 | CTGAGGTGCG | SEQ ID NO: 866 | GGAGCTACCG | SEQ ID NO: 1842 |
| 765 | CGTGAATCTT | SEQ ID NO: 867 | AGTATCGTAC | SEQ ID NO: 1843 |
| 766 | CGTCGACTAG | SEQ ID NO: 868 | TTGGTCGTTG | SEQ ID NO: 1844 |
| 767 | ATTAAGCGTG | SEQ ID NO: 869 | GTCACGACAT | SEQ ID NO: 1845 |
| 768 | TCCGGCGTCG | SEQ ID NO: 870 | AATGCATCGT | SEQ ID NO: 1846 |
| 769 | AGGAGGCCAG | SEQ ID NO: 871 | AGGACATAAC | SEQ ID NO: 1847 |
| 770 | GGATGGTGCA | SEQ ID NO: 872 | CGGTCATGTG | SEQ ID NO: 1848 |
| 771 | CTGGCGGAAG | SEQ ID NO: 873 | CGACTTATCT | SEQ ID NO: 1849 |
| 772 | TCAGTTGCAA | SEQ ID NO: 874 | ACCACGAGCC | SEQ ID NO: 1850 |
| 773 | GTCTTATTGG | SEQ ID NO: 875 | GGCTGAACGG | SEQ ID NO: 1851 |
| 774 | GCCTAAGAGG | SEQ ID NO: 876 | GCCAGGCGAA | SEQ ID NO: 1852 |
| 775 | AGTCTAAGGA | SEQ ID NO: 877 | GAATGCGGTC | SEQ ID NO: 1853 |
| 776 | GAGTCTGTGA | SEQ ID NO: 878 | TCTAACAACG | SEQ ID NO: 1854 |
| 777 | CTACATCGTC | SEQ ID NO: 879 | TTATACCGAA | SEQ ID NO: 1855 |
| 778 | TATATCTCAG | SEQ ID NO: 880 | ACACCACAGT | SEQ ID NO: 1856 |
| 779 | CCGTCACGTT | SEQ ID NO: 881 | TCAGACACCG | SEQ ID NO: 1857 |
| 780 | TATCGAGGCC | SEQ ID NO: 882 | GTAGCCACAA | SEQ ID NO: 1858 |
| 781 | TGAGGTATCT | SEQ ID NO: 883 | GACGAGGCGA | SEQ ID NO: 1859 |
| 782 | ATCGTTGAAT | SEQ ID NO: 884 | ATCTACATAT | SEQ ID NO: 1860 |
| 783 | CGTGCATGTA | SEQ ID NO: 885 | TGAGACGTTG | SEQ ID NO: 1861 |
| 784 | CGGACACCTT | SEQ ID NO: 886 | ATTCTGCCGA | SEQ ID NO: 1862 |
| 785 | AGTGGAGTCC | SEQ ID NO: 887 | CAGATCGAGA | SEQ ID NO: 1863 |
| 786 | TTGTGCATGC | SEQ ID NO: 888 | GAGCGCTGTT | SEQ ID NO: 1864 |
| 787 | TCTAAGGCAT | SEQ ID NO: 889 | GCACAATTAT | SEQ ID NO: 1865 |
| 788 | ATGAGGTATC | SEQ ID NO: 890 | GCAATTCGCC | SEQ ID NO: 1866 |
| 789 | CGGCTGTGAT | SEQ ID NO: 891 | ATATATAGTA | SEQ ID NO: 1867 |
| 790 | CCACGTGCGA | SEQ ID NO: 892 | AACCGTAGTT | SEQ ID NO: 1868 |
| 791 | GGCATGGAGT | SEQ ID NO: 893 | CACATTGTCA | SEQ ID NO: 1869 |
| 792 | CGATGTCGTG | SEQ ID NO: 894 | AGACAGTCAA | SEQ ID NO: 1870 |
| 793 | GAAGGCTGCG | SEQ ID NO: 895 | TGACAAGGAC | SEQ ID NO: 1871 |
| 794 | GCGTTATGCG | SEQ ID NO: 896 | TATATAGCCG | SEQ ID NO: 1872 |
| 795 | CACACATGCG | SEQ ID NO: 897 | GTTCTCAGAT | SEQ ID NO: 1873 |
| 796 | GCCTCGAAGG | SEQ ID NO: 898 | GATAATCTCC | SEQ ID NO: 1874 |
| 797 | CCGGCAGGTC | SEQ ID NO: 899 | GGTCCTTGTA | SEQ ID NO: 1875 |
| 798 | CGTGAAGGCA | SEQ ID NO: 900 | GAACAGACTG | SEQ ID NO: 1876 |
| 799 | GCGACATCGT | SEQ ID NO: 901 | GAAGAATCTA | SEQ ID NO: 1877 |
| 800 | CGTCGCGATG | SEQ ID NO: 902 | CGTTGAATTG | SEQ ID NO: 1878 |
| 801 | GAGGCTGAGC | SEQ ID NO: 903 | GGTACCGCTG | SEQ ID NO: 1879 |
| 802 | AGGCTGGCCT | SEQ ID NO: 904 | GTGCACGCAG | SEQ ID NO: 1880 |
| 803 | TGGTGTTATA | SEQ ID NO: 905 | ATTCGATATT | SEQ ID NO: 1881 |
| 804 | CGTGCGTGCG | SEQ ID NO: 906 | CTGAATGACC | SEQ ID NO: 1882 |
| 805 | CGAGGTGACG | SEQ ID NO: 907 | CTATTAAGGA | SEQ ID NO: 1883 |
| 806 | GTGTTAGGCT | SEQ ID NO: 908 | GAATCACAAT | SEQ ID NO: 1884 |
| 807 | CGAGGCACAG | SEQ ID NO: 909 | AAGGACCTCT | SEQ ID NO: 1885 |
| 808 | CGCGTCTCAG | SEQ ID NO: 910 | TCTCAATACA | SEQ ID NO: 1886 |
| 809 | TATAGCTGTG | SEQ ID NO: 911 | ATGAAGCCAT | SEQ ID NO: 1887 |
| 810 | CTTAGTACTC | SEQ ID NO: 912 | CCAATCTACC | SEQ ID NO: 1888 |
| 811 | ATCGTCTCTC | SEQ ID NO: 913 | TCTGAAGTCC | SEQ ID NO: 1889 |
| 812 | TTCAGGCTTA | SEQ ID NO: 914 | GCAAGGTTCA | SEQ ID NO: 1890 |
| 813 | TCGTGTCACG | SEQ ID NO: 915 | CGTAATCAAG | SEQ ID NO: 1891 |
| 814 | CTTAACGGAA | SEQ ID NO: 916 | TGTGAATATA | SEQ ID NO: 1892 |
| 815 | GAGGCGTGGC | SEQ ID NO: 917 | GGTTGAGTAA | SEQ ID NO: 1893 |
| 816 | TATAGCGTAG | SEQ ID NO: 918 | ACGTAGACCA | SEQ ID NO: 1894 |
| 817 | TGCAAGTCAG | SEQ ID NO: 919 | TATCGACAGA | SEQ ID NO: 1895 |
| 818 | CGTGCCGCAT | SEQ ID NO: 920 | ATCGTACTGT | SEQ ID NO: 1896 |
| 819 | GTGAGTACGT | SEQ ID NO: 921 | TAAGGCTTGT | SEQ ID NO: 1897 |
| 820 | TTACGTAAGC | SEQ ID NO: 922 | TGTAGCCTGA | SEQ ID NO: 1898 |
| 821 | GGAGTCGAGG | SEQ ID NO: 923 | GGACCATAGC | SEQ ID NO: 1899 |
| 822 | ATGGCGTCTC | SEQ ID NO: 924 | CGGTGGCAGA | SEQ ID NO: 1900 |
| 823 | CGATCTCCGT | SEQ ID NO: 925 | ACTCCGGTCA | SEQ ID NO: 1901 |
| 824 | ACGAATTATA | SEQ ID NO: 926 | GTTACTGGTG | SEQ ID NO: 1902 |
| 825 | AGGCTCGGTC | SEQ ID NO: 927 | GGATCGCGGC | SEQ ID NO: 1903 |
| 826 | ATGCAGTCGA | SEQ ID NO: 928 | AGATGGTAAC | SEQ ID NO: 1904 |
| 827 | ATCTCGTATC | SEQ ID NO: 929 | GCTGAACCAC | SEQ ID NO: 1905 |
| 828 | AATCTTATGG | SEQ ID NO: 930 | GCAGGCTTCC | SEQ ID NO: 1906 |
| 829 | CGAACTTGAT | SEQ ID NO: 931 | AACGCTACGA | SEQ ID NO: 1907 |
| 830 | AGGTGCGTCG | SEQ ID NO: 932 | GTCATGCAGG | SEQ ID NO: 1908 |
| 831 | TTATACTACA | SEQ ID NO: 933 | CTCTCTATCC | SEQ ID NO: 1909 |
| 832 | GCAACGCGTT | SEQ ID NO: 934 | TAAGTTAGAT | SEQ ID NO: 1910 |
| 833 | CATGGTGTGT | SEQ ID NO: 935 | AACAATACAA | SEQ ID NO: 1911 |
| 834 | CTGTGGATAA | SEQ ID NO: 936 | TGTTAGGCTG | SEQ ID NO: 1912 |
| 835 | TTGGAAGTTC | SEQ ID NO: 937 | ACCTCGATGT | SEQ ID NO: 1913 |
| 836 | AGTACTAATG | SEQ ID NO: 938 | ATGTATCGAA | SEQ ID NO: 1914 |
| 837 | AGAAGAGGAC | SEQ ID NO: 939 | GCATCACTTG | SEQ ID NO: 1915 |
| 838 | GTTGATTGTA | SEQ ID NO: 940 | CCGATGACTT | SEQ ID NO: 1916 |
| 839 | GCGAGCGTTG | SEQ ID NO: 941 | TTATGACCTC | SEQ ID NO: 1917 |
| 840 | TTCGGAAGGA | SEQ ID NO: 942 | GAATAACGAC | SEQ ID NO: 1918 |
| 841 | TGATCGGAGC | SEQ ID NO: 943 | CATGTTGCAT | SEQ ID NO: 1919 |
| 842 | CTCGAGACTT | SEQ ID NO: 944 | CAATCCTTCC | SEQ ID NO: 1920 |
| 843 | TCAATCGATT | SEQ ID NO: 945 | TAGGCCACGC | SEQ ID NO: 1921 |
| 844 | AAGAGCGCTA | SEQ ID NO: 946 | AGATGACACC | SEQ ID NO: 1922 |
| 845 | CATGAGTGAG | SEQ ID NO: 947 | AATCGAACAG | SEQ ID NO: 1923 |
| 846 | TCACGCGCGT | SEQ ID NO: 948 | ACCGTATCAG | SEQ ID NO: 1924 |
| 847 | GTTGTGAGCT | SEQ ID NO: 949 | TGGTAGTTGC | SEQ ID NO: 1925 |
| 848 | GCTAGCGAGG | SEQ ID NO: 950 | GGAGTTCGAG | SEQ ID NO: 1926 |
| 849 | GCGCAGCGAG | SEQ ID NO: 951 | CCTACTAAGA | SEQ ID NO: 1927 |
| 850 | CTATGAGTCA | SEQ ID NO: 952 | ATCGAGAATA | SEQ ID NO: 1928 |
| 851 | CCGTGCATCA | SEQ ID NO: 953 | AACCTACACG | SEQ ID NO: 1929 |
| 852 | AATTAGTGTC | SEQ ID NO: 954 | ATAAGCTGCA | SEQ ID NO: 1930 |
| 853 | CGGACTGTGC | SEQ ID NO: 955 | ATGACTCCGG | SEQ ID NO: 1931 |
| 854 | CGTGTTACGG | SEQ ID NO: 956 | CTCTGGACAC | SEQ ID NO: 1932 |
| 855 | TACAAGGCTG | SEQ ID NO: 957 | GCGCCAACTG | SEQ ID NO: 1933 |
| 856 | GTATTAATAG | SEQ ID NO: 958 | CACACGGCCG | SEQ ID NO: 1934 |
| 857 | GCCTCGGATA | SEQ ID NO: 959 | GTCACACAAT | SEQ ID NO: 1935 |
| 858 | GACGTCCGAA | SEQ ID NO: 960 | CGTCGCAAGC | SEQ ID NO: 1936 |
| 859 | GTTATGATAT | SEQ ID NO: 961 | CGGTAGCAAT | SEQ ID NO: 1937 |
| 860 | TAGGCGTCTA | SEQ ID NO: 962 | GTCTTACCTC | SEQ ID NO: 1938 |
| 861 | CCTATATAGC | SEQ ID NO: 963 | AACAAGCACT | SEQ ID NO: 1939 |
| 862 | TTGAATTCAC | SEQ ID NO: 964 | CTTAGCGAGT | SEQ ID NO: 1940 |
| 863 | GCTCTCTATA | SEQ ID NO: 965 | GAGGTGTTCA | SEQ ID NO: 1941 |
| 864 | ATTCATCTCC | SEQ ID NO: 966 | ATTATGCATC | SEQ ID NO: 1942 |
| 865 | ATGGAAGCGG | SEQ ID NO: 967 | GCGACGGATC | SEQ ID NO: 1943 |
| 366 | CAGGTAGCTA | SEQ ID NO: 968 | CAAGCAGGTA | SEQ ID NO: 1944 |
| 867 | CCGTGAATTC | SEQ ID NO: 969 | CCACACGTAG | SEQ ID NO: 1945 |
| 868 | CGTGTCGGTG | SEQ ID NO: 970 | TCAGTCGCGG | SEQ ID NO: 1946 |
| 869 | CCGTCGAGTG | SEQ ID NO: 971 | ATGATCGCTC | SEQ ID NO: 1947 |
| 870 | AGGACGTCGT | SEQ ID NO: 972 | AGGCGTAACT | SEQ ID NO: 1948 |
| 871 | GCAGAGTGTC | SEQ ID NO: 973 | TATGAACACA | SEQ ID NO: 1949 |
| 872 | TTCCACGTGG | SEQ ID NO: 974 | ACAATCGTAG | SEQ ID NO: 1950 |
| 873 | TGGAGGCTCC | SEQ ID NO: 975 | ATAGAGGACA | SEQ ID NO: 1951 |
| 874 | TGGAGATCGG | SEQ ID NO: 976 | AGTGTACATG | SEQ ID NO: 1952 |
| 875 | ATCTTACGTG | SEQ ID NO: 977 | GCGTGACATC | SEQ ID NO: 1953 |
| 876 | TAGGTGACGT | SEQ ID NO: 978 | ACCACAGCAA | SEQ ID NO: 1954 |
| 877 | GTCTCCTTAT | SEQ ID NO: 979 | TCAGTTAACC | SEQ ID NO: 1955 |
| 878 | TTGAGAGGCT | SEQ ID NO: 980 | AGGACTTAGA | SEQ ID NO: 1956 |
| 879 | GTGTGTGTCA | SEQ ID NO: 981 | CTGAGTATCT | SEQ ID NO: 1957 |
| 880 | TCTAGAACTT | SEQ ID NO: 982 | CGGCCTATAT | SEQ ID NO: 1958 |
| 881 | GCGTGTCCTG | SEQ ID NO: 983 | GCGTAGTGAT | SEQ ID NO: 1959 |
| 882 | GGATCCAATC | SEQ ID NO: 984 | CGGCGAGCGG | SEQ ID NO: 1960 |
| 883 | GACCGATCGG | SEQ ID NO: 985 | CAGTGTGGCT | SEQ ID NO: 1961 |
| 884 | TGGCGTAGGT | SEQ ID NO: 986 | ATGAATAGGT | SEQ ID NO: 1962 |
| 885 | GAAGACGCGT | SEQ ID NO: 987 | TGGTCCTCGA | SEQ ID NO: 1963 |
| 886 | CGAGCGTGAC | SEQ ID NO: 988 | ACGTGCGGTT | SEQ ID NO: 1964 |
| 887 | GCATGCCATA | SEQ ID NO: 989 | CGTGTTCACA | SEQ ID NO: 1965 |
| 888 | CCGCTGCGTC | SEQ ID NO: 990 | GTTAATCGTC | SEQ ID NO: 1966 |
| 889 | CCATTAATGC | SEQ ID NO: 991 | ATGTCACAGT | SEQ ID NO: 1967 |
| 890 | GGCATGCCTA | SEQ ID NO: 992 | CTGGCTACTG | SEQ ID NO: 1968 |
| 891 | ACGCGTCGTT | SEQ ID NO: 993 | CATCTGGTCA | SEQ ID NO: 1969 |
| 892 | GACAACGTTG | SEQ ID NO: 994 | TTACGCTCTA | SEQ ID NO: 1970 |
| 893 | GTCATATATG | SEQ ID NO: 995 | TCGATTCATT | SEQ ID NO: 1971 |
| 894 | CCGTCGTACC | SEQ ID NO: 996 | ATGAAGATCA | SEQ ID NO: 1972 |
| 895 | ATGTGTTGGA | SEQ ID NO: 997 | CCATCTAAGT | SEQ ID NO: 1973 |
| 896 | AATGGCCATG | SEQ ID NO: 998 | GCGAACAACT | SEQ ID NO: 1974 |
| 897 | CTACTCGAGT | SEQ ID NO: 999 | CACACACCTC | SEQ ID NO: 1975 |
| 898 | AAGAGCGGAT | SEQ ID NO: 1000 | GCCGACACCT | SEQ ID NO: 1976 |
| 899 | CGGTCGTGGA | SEQ ID NO: 1001 | TCGTATGAGC | SEQ ID NO: 1977 |
| 900 | ATGTAGGTAC | SEQ ID NO: 1002 | GGTTACGAGA | SEQ ID NO: 1978 |
| 901 | AGCGCGTACG | SEQ ID NO: 1003 | GATCAGAGCC | SEQ ID NO: 1979 |
| 902 | TAGCTATGCC | SEQ ID NO: 1004 | AGAGCCTGTC | SEQ ID NO: 1980 |
| 903 | CTGTTCTATG | SEQ ID NO: 1005 | GAGCTAGCCT | SEQ ID NO: 1981 |
| 904 | AAGTGCGAGG | SEQ ID NO: 1006 | CAGAGGTTCC | SEQ ID NO: 1982 |
| 905 | CTTAAGCTAG | SEQ ID NO: 1007 | TCTGAGACCT | SEQ ID NO: 1983 |
| 906 | GAGGTTATGA | SEQ ID NO: 1008 | AGTCTCTAGG | SEQ ID NO: 1984 |
| 907 | CGTCGTGAAC | SEQ ID NO: 1009 | AGTCCACGTA | SEQ ID NO: 1985 |
| 908 | TATCAATTGA | SEQ ID NO: 1010 | ACTTCTAGAG | SEQ ID NO: 1986 |
| 909 | GTACAGGATA | SEQ ID NO: 1011 | GGCTTCTGAT | SEQ ID NO: 1987 |
| 910 | GGAGATGCAT | SEQ ID NO: 1012 | CCATGGTGGC | SEQ ID NO: 1988 |
| 911 | CCTGCTAGCA | SEQ ID NO: 1013 | AGAGCTTGCG | SEQ ID NO: 1989 |
| 912 | GATGGTTGGC | SEQ ID NO: 1014 | TCTTCCGAAT | SEQ ID NO: 1990 |
| 913 | TAGACCGGTC | SEQ ID NO: 1015 | GGTTGCCGCA | SEQ ID NO: 1991 |
| 914 | GGCGTACGTA | SEQ ID NO: 1016 | GCACAAGTGG | SEQ ID NO: 1992 |
| 915 | CGGTGGAGGT | SEQ ID NO: 1017 | GACTTCTTCA | SEQ ID NO: 1993 |
| 916 | CCGATTCGAT | SEQ ID NO: 1018 | TAAGACAGAC | SEQ ID NO: 1994 |
| 917 | CGAGTGCTAG | SEQ ID NO: 1019 | TGGTGACCAC | SEQ ID NO: 1995 |
| 918 | AGGAGTTGCG | SEQ ID NO: 1020 | GACTAATAAG | SEQ ID NO: 1996 |
| 919 | ATATGAGCGT | SEQ ID NO: 1021 | GCAACCGTTC | SEQ ID NO: 1997 |
| 920 | GTCTCGCGTA | SEQ ID NO: 1022 | TTGAACGGCA | SEQ ID NO: 1998 |
| 921 | CGGAGTCCGG | SEQ ID NO: 1023 | ATGGCCACCT | SEQ ID NO: 1999 |
| 922 | CATGGAGGAC | SEQ ID NO: 1024 | AAGAGGAATG | SEQ ID NO: 2000 |
| 923 | AAGGCTAACG | SEQ ID NO: 1025 | GCAGGTGGAA | SEQ ID NO: 2001 |
| 924 | AACGTGTGGT | SEQ ID NO: 1026 | CGCCGAATAT | SEQ ID NO: 2002 |
| 925 | GTGCCGTGTG | SEQ ID NO: 1027 | CAACGTGCCG | SEQ ID NO: 2003 |
| 926 | CGCCTAGGCC | SEQ ID NO: 1028 | ACAGGTACAC | SEQ ID NO: 2004 |
| 927 | TCGTGTGGAT | SEQ ID NO: 1029 | GAACGTAAGG | SEQ ID NO: 2005 |
| 928 | CCGCGGCTAT | SEQ ID NO: 1030 | GCCTAACAAT | SEQ ID NO: 2006 |
| 929 | TTGTCGTGTA | SEQ ID NO: 1031 | AACGTGCGCG | SEQ ID NO: 2007 |
| 930 | CTTGCTGTCT | SEQ ID NO: 1032 | AGGTACGGCT | SEQ ID NO: 2008 |
| 931 | TAGCGTGTCT | SEQ ID NO: 1033 | TACCAACGTA | SEQ ID NO: 2009 |
| 932 | TATACGCTCT | SEQ ID NO: 1034 | CTAAGCAAGA | SEQ ID NO: 2010 |
| 933 | CAAGAGGCTA | SEQ ID NO: 1035 | CTCGCAGGAC | SEQ ID NO: 2011 |
| 934 | TTCGATATCG | SEQ ID NO: 1036 | ATCGTCGTCC | SEQ ID NO: 2012 |
| 935 | ATGTCTCTAC | SEQ ID NO: 1037 | TCACCGCTCC | SEQ ID NO: 2013 |
| 936 | CCGGCTTGGC | SEQ ID NO: 1038 | TTATATTCAT | SEQ ID NO: 2014 |
| 937 | CCGATCGCGG | SEQ ID NO: 1039 | CATTGTGATT | SEQ ID NO: 2015 |
| 938 | CACTAGTGCG | SEQ ID NO: 1040 | AAGGCTGGTT | SEQ ID NO: 2016 |
| 939 | CGTGTCTTCC | SEQ ID NO: 1041 | AGGAGGATAT | SEQ ID NO: 2017 |
| 940 | CCGTATATAC | SEQ ID NO: 1042 | ACGACCGTCA | SEQ ID NO: 2018 |
| 941 | CCGTGTCTGA | SEQ ID NO: 1043 | CGCGTAGTGG | SEQ ID NO: 2019 |
| 942 | CCGGAGTCGC | SEQ ID NO: 1044 | ATTCACGCTG | SEQ ID NO: 2020 |
| 943 | CGGATCATCC | SEQ ID NO: 1045 | AGTGTTGCAC | SEQ ID NO: 2021 |
| 944 | CTATGTTACG | SEQ ID NO: 1046 | ACGATTGAGC | SEQ ID NO: 2022 |
| 945 | TATACCAGGA | SEQ ID NO: 1047 | GCAATCAATG | SEQ ID NO: 2023 |
| 946 | GATGAGGAGT | SEQ ID NO: 1048 | GGCATCCAAC | SEQ ID NO: 2024 |
| 947 | GTGTCTCCAT | SEQ ID NO: 1049 | TATGTCGCTC | SEQ ID NO: 2025 |
| 948 | GAGAGCGTCA | SEQ ID NO: 1050 | TGCGTTCGAC | SEQ ID NO: 2026 |
| 949 | ATGTTGAGCA | SEQ ID NO: 1051 | TTGAAGCGAG | SEQ ID NO: 2027 |
| 950 | TATACTCAAT | SEQ ID NO: 1052 | GCCTCACTGA | SEQ ID NO: 2028 |
| 951 | TCGGCTATGT | SEQ ID NO: 1053 | CTATAGCAAG | SEQ ID NO: 2029 |
| 952 | GTAGGCTAGC | SEQ ID NO: 1054 | GGTGCAACGG | SEQ ID NO: 2030 |
| 953 | GGAGCGTCGC | SEQ ID NO: 1055 | GGCCGCGTAG | SEQ ID NO: 2031 |
| 954 | ATGCGACCAC | SEQ ID NO: 1056 | AAGAGAGAGT | SEQ ID NO: 2032 |
| 955 | CCGAAGGAGG | SEQ ID NO: 1057 | AGGTTGTAGG | SEQ ID NO: 2033 |
| 956 | CTCCGAGGCG | SEQ ID NO: 1058 | TACTTAGGAA | SEQ ID NO: 2034 |
| 957 | GCTATGACGT | SEQ ID NO: 1059 | AAGGTCGTGG | SEQ ID NO: 2035 |
| 958 | GTCTATGTGG | SEQ ID NO: 1060 | TGGAGTTAAT | SEQ ID NO: 2036 |
| 959 | TATACAACCT | SEQ ID NO: 1061 | TAACCGCAAG | SEQ ID NO: 2037 |
| 960 | CCGAGAGTCG | SEQ ID NO: 1062 | ATTAGTCCTG | SEQ ID NO: 2038 |
| 961 | CTTATAGGAT | SEQ ID NO: 1063 | ATAGGTGGCA | SEQ ID NO: 2039 |
| 962 | CGGATATACA | SEQ ID NO: 1064 | GAGTGCCATG | SEQ ID NO: 2040 |
| 963 | GGCCAGAGTC | SEQ ID NO: 1065 | TTGAGAATCA | SEQ ID NO: 2041 |
| 964 | CGGATGCTGT | SEQ ID NO: 1066 | GGCTGGTCCG | SEQ ID NO: 2042 |
| 965 | CGAGATATAC | SEQ ID NO: 1067 | CGGCGCTCGC | SEQ ID NO: 2043 |
| 966 | GGATCCAGGT | SEQ ID NO: 1068 | GCAATAGAAC | SEQ ID NO: 2044 |
| 967 | GTAATTACAC | SEQ ID NO: 1069 | TCGCCTTGCG | SEQ ID NO: 2045 |
| 968 | CACGTGAGTA | SEQ ID NO: 1070 | CCTCTTCGTA | SEQ ID NO: 2046 |
| 969 | CCTTAAGGAA | SEQ ID NO: 1071 | GATGATATGG | SEQ ID NO: 2047 |
| 970 | AGATTATAAT | SEQ ID NO: 1072 | GAGCGGCTTA | SEQ ID NO: 2048 |
| 971 | AGTCTCTTAT | SEQ ID NO: 1073 | ATGTTAACAT | SEQ ID NO: 2049 |
| 972 | AAGGCTATGC | SEQ ID NO: 1074 | AAGGATCGCG | SEQ ID NO: 2050 |
| 973 | TAATATTAAG | SEQ ID NO: 1075 | ATGGCATGGT | SEQ ID NO: 2051 |
| 974 | TGCAAGATCC | SEQ ID NO: 1076 | CTAATAACCT | SEQ ID NO: 2052 |
| 975 | TGTCGATCGA | SEQ ID NO: 1077 | ACTCGCACAT | SEQ ID NO: 2053 |
| 976 | AGATCGGTTA | SEQ ID NO: 1078 | ATGATATATT | SEQ ID NO: 2054 |

[0150] Specific sequences of an I5 sequencing adapter and a Nextera I7 sequencing adapter are shown in Table 3.

TABLE 3
I5 sequencing adapter and Nextera I7 sequencing adapter

| Adapter name | Sequence | Sequence No. |
|---|---|---|
| I5 sequencing | AATGATACGGCGACCACCGAGATCTACA | SEQ ID NO: 98 |
| adapter | | |
| Nextera I7 | CTGTCTCTTATACACATCTCCGAGCCCACG | SEQ ID NO: 2069 |
| sequencing adapter | AGA | |

[0151] An example of primers for first synthesis of a DUDI and an Illumina sequencing adapter is as follows:

a forward primer:
(SEQ ID NO: 2065)
CACGACGCTCTTCCGATCTtcagtatcctCAAACATAGACTCCTCGCAT
AGCCT;
and
a reverse primer:
(SEQ ID NO: 2066)
CTCGGAGATGTGTATAAGAGACAGcacgccaacgACCTCCATCCGAGAC
ACACG.

[0152] 2. An undiluted third PCR preamplification product was adopted as a PCR template. One tube of the PCR template was prepared for each sample.

[0153] 3. A 30 μL PCR system was prepared from the following reagents: 2× PCR enzyme (including UDG and UTP): 15 μL, water: 12 μL, forward primer (10 μM) for adding a barcode and a sequencing adapter: 0.5 μL, reverse primer (10 μM) for adding the barcode and the sequencing adapter: 0.5 μL, and third PCR preamplification product: 2 μL.

[0154] 4. qPCR for barcode addition

[0155] Each third PCR preamplification product was subjected to qPCR with a specific forward primer for adding a barcode and a sequencing adapter and a reverse primer for adding the barcode and the sequencing adapter, and a PCR procedure was as follows: 37° C. for 10 min; (1) 95° C. for 10 min; (2) 3 cycles of (95° C. for 15 s, 62° C. for 30 s, and 72° C. for 1 min); (3) 2 cycles of (95° C. for 15 s, 64° C. for 30 s, and 72° C. for 1 min); and (4) 45 cycles of (95° C. for 15 s, 68° C. 30 s, and 72° C. for 1 min), and then a fluorescence signal was collected.

[0156] 5. The PCR was repeated directly by a common PCR instrument using a dilution factor and a log-phase cycle number of each sample determined by the qPCR above. The same parameters as the qPCR procedure above were adopted as much as possible, including temperature rise and fall rates. A log-phase cycle number of PCR for adding a barcode was determined.

[0157] 6. A procedure for common PCR amplification was as follows: (1) 95° C. for 10 min; (2) 3cycles of (95° C. for 15 s, 62° C. for 30 s, and 72° C. for 1 min); (3) 2 cycles of (95° C. for 15 s, 64° C. for 30 s, and 72° C. for 1 min); (4) 11 *cycles of (95° C. for 15 s, 68° C. for 30 s, and 72° C. for 1 min) (A *cycle number was determined by the qPCR above); (5) 1 cycle of (95° C. for 15 s and 72° C. for 20 min); and (6) a first PCR tube was incubated at 72° C. for 18 min, and then taken out and immediately placed on ice to stop the Taq activity.

[0158] 7. 30 μL of chloroform was added to the first PCR tube on ice (the chloroform was placed on ice for 30 min in advance), and then the first PCR tube was vortexed (for about 1 min).

[0159] 8. The first PCR tube was centrifuged at 12,000 rpm and 4° C. for 15 min, and 25 μL of a resulting supernatant was taken and added to a second PCR tube (chloroform should not be touched, and a part of the supernatant was left).

[0160] 9. The second PCR tube was carefully centrifuged in a mini centrifuge until the whole sample was precipitated to a bottom of the second PCR tube, and then placed in a PCR instrument at 50° C. for 10 min to allow the chloroform completely volatilized, otherwise the chloroform would inhibit a downstream enzyme reaction.

[0161] 10. After PCR was completed, 2.5 μL of a diluted EXOI (Thermolabile) solution was added to the second PCR tube.

[0162] 11. The second PCR tube was inverted up and down for thorough mixing, and then carefully centrifuged at 37° C. for 20 min and then at 42° C. for 10 min.

[0163] 12. The ExoI was inactivated through a heat treatment at 60° C. for 15 min.

[0164] 13. 3% agarose gel electrophoresis was conducted for 45 min to 60 min with a 50 bp marker, and whether a primer band disappeared was observed.

### IV. qPCR Amplification of a PCR Product with an Adapter Added (2× PCR Enzyme with UTP and without UDG)

[0165] 1. qPCR of a PCR product with a barcode and an adapter added:

[0166] The PCR product obtained in the above experiment was diluted 50-fold to serve as a template. Primers used for the qPCR were designed as follows: a forward primer: an I5 sequencing adapter-containing sequence+an OUDI (I5 Index)+a sequence partially overlapping with a 5′ terminus of IUDI; and
[0167] a reverse primer: a Nextera I7 sequencing adapter-containing sequence+an OUDI (I7 Index sequence)+a sequence partially overlapping with a 5′ terminus of the IUDI in the above reverse primer.

[0168] The I5 Index and I7 Index sequences are selected from the I5 Index and I7 Index sequence sets in Table 2, but are different from the I5 Index and I7 Index sequences involved in the first PCR amplification.

[0169] An example of primers for the second PCR to add an OUDI are as follows:

a forward primer:
(SEQ ID NO: 2067)
AATGATACGGCGACCACCGAGATCTACACtacgaatcttACACTCTTTC
CCTACACGACGCTCTTCCGATCT;
and
a reverse primer:
(SEQ ID NO: 2068)
CTGTCTCTTATACACATCTCCGAGCCCACGAGACaccaagttacCTCGG
AGATGTGTATAAGAGACAG.

[0170] 2. A qPCR procedure was as follows: (1) 95° C. for 10 min: (2) 3 cycles of (95° C. for 15 s, 62° C. for 30 s, and 72° C. for 1 min); (3) 2 cycles of (95° C. for 15 s, 64° C. for 30 s, and 72° C. for 1 min); and (4) 45 cycles of (95° C. for 15 s, 68° C. for 30 s, and 72° C. for 1 min), and then a fluorescence signal was collected. 3 replicates were set for each qPCR sample.

[0171] 3. A dilution factor was calculated according to results of the above qPCR. Common PCR amplification (a small cycle number, which was intended to prevent the introduction of a human error), where 6 wells were set for each sample.

[0172] 4. A procedure for the common PCR amplification was as follows: (1) 95° C. for 10 min; (2) 3 cycles of (95° C. for 15 s, 62° C. for 30 s, and 72° C. for 1 min); (3) 2 cycles of (95° C. for 15 s, 64° C. for 30 s, and 72° C. for 1 min); (4) 11 cycles of (95° C. for 15 s, 68° C. for 30 s, and 72° C. for 1 min); (5) 1 cycle of (95° C. for 15 s and 72° C. for 20 min); and (6) a PCR tube was incubated at 72° C. for 18 min, and then taken out and immediately placed on ice to stop the Taq activity. * A cycle number was determined by the qPCR described above (if it was impossible to continue, a resulting reaction system was stored at 4° C. or long-term stored at −20° C.).

[0173] 5. After PCR was completed, 2.5 μL of diluted EXOI (Thermolabile) was added to the PCR tube.

[0174] 6. The PCR tube was inverted up and down for thorough mixing, and then carefully centrifuged at 37° C. for 20 min and then at 42° C. for 10 min.

[0175] 7. The ExoI was inactivated through a heat treatment at 60° C. for 15 min.

[0176] 8. All samples were placed on ice, and 6 wells of PCR samples for each sample were mixed. Then qPCR was conducted (each sample was diluted 100,000-fold, and 3 replicates were set for a dilution; and 45 cycles were adopted).

### V. Precipitation and Gel Recovery of a Pooled Barcode and Adapter-Containing PCR Product

[0177] 1. According to qPCR quantitative results, all samples were pooled in equal amounts and then vortexed for thorough mixing. Two replicates were set for the following experimental steps.

[0178] 2. 700 μL of a pooled adapter-containing sample was added to a 1.5 mL EP tube.

[0179] 3. 77 μL of a 3 M pH 5.2 sodium acetate solution was added to the EP tube.

[0180] 4. 500 μL of isopropanol was added to the EP tube, and a resulting mixture was thoroughly mixed (the steps 2 to 4 needed to be conducted on ice).

[0181] 5. The EP tube was placed at −20° C. or −80° C. for 1 h and then centrifuged in a centrifuge (with a cover handle facing outwards) at 15,000 g and 4° C. for 30 min.

[0182] 6. When a first white DNA pellet was produced at a bottom of the EP tube, a resulting first supernatant was carefully poured off, and a first residual supernatant was carefully removed with a P200 pipette, during which the DNA pellet should not be touched to prevent DNA from being removed.

[0183] 7. 500 μL of 70% room-temperature ethanol was added to the EP tube, and then the EP tube was placed at room temperature for 5 min.

[0184] 8. The EP tube was centrifuged at 15,000 g and 4° C. for 30 min.

[0185] 9. When a second white DNA pellet was produced at a bottom of the EP tube, a resulting second supernatant was carefully poured off, and a second residual supernatant was carefully removed with a P200 pipette.

[0186] 10. The EP tube was horizontally placed in a clean bench (the EP tube was uncapped) and air-dried for about 10 min.

[0187] 11. 60 μL of TE was added to the EP tube for dissolution.

[0188] 12. A 1.5% agarose gel was prepared (the agarose gel had a thickness of about 1 cm, could hold 15 μL of a sample, and had a length twice a common length, namely about 15 cm).

[0189] 13. Electrophoresis was conducted with a 3-4 pore gel for recovery. Notes: A dye band should run to a bottom of a gel, otherwise DNA fragments of different sizes cannot be fully separated. When a gel is cut, the smaller the gel band, the better, but a main band should be strictly included.

[0190] 14. Recovered DNA was dissolved with 60 μL of TE. A DNA concentration of a resulting DNA solution was determined by electrophoresis, and then the DNA solution was stored at −20° C. for later use.

[0191] The precipitation and gel recovery were conducted with a mixed solution of all samples. If a PCR product had a high purity, the gel recovery was not required, and after the product was precipitated, the PCR primers were removed with the ExoI to obtain an isomiR library.

[0192] The constructed isomiR library was used to conduct NGS to obtain sequencing results.

### EXAMPLE 2

### Computer Processing of NGS Data

[0193] Raw NGS data were split into files of a number corresponding a number of samples (such as 200) in the pooled sample according to DUDI sequences. After the splitting, sequences irrelevant to mature miRNAs were removed by trimming software, and short RNA-seq data sets were directly processed by IsoMiRmap software to identify and quantify all isomiRs.

[0194] Batch effect analysis: Technical repeats can be used for batch effect analysis. A batch effect refers to the fact that a technical difference between different batches may result in significant heterogeneity between data of the different batches. If there is heterogeneity of replicated NGS data, it indicates poor repeatability, that is, there is a batch effect affecting the repeatability. A batch effect can be effectively removed by the batch effect removal software ComBat-seq. NGS data of seven batches were subjected to batch effect removal with the batch effect removal software ComBat-seq, and then calibrated into data in rpm (readings per million).

[0195] FIG. 2 is a scatter plot of PCA for NGS results of three replicated batches; NGS results of the three replicated batches each include 200 samples and 239 isomiRs. The scatter plot is obtained through dimensionality reduction by PCA. Data points of the three replicated batches are distinguished by different colors, as shown in FIG. 2.

[0196] Cluster overlap: The data points of the three replicated batches are blended with each other throughout the plot, indicating poor separation among the three batches. This blending may indicate that the intra-batch variability is similar to the inter-batch variability, which is a result of excellent repeatability of replicated experiments.

[0197] Inter-batch consistency: Since there is no obvious clustering of each batch, it may indicate that samples of all batches are consistent. If the batches should be the same under replicated experimental conditions, then it can be interpreted that the experiment is repeatable.

[0198] No batch effect: Since there is no obvious independent clustering to separate the batches, it means that there is no significant batch effect. A batch effect is typically manifested as independent clustering for each batch.

[0199] Potential outliers: It seems that there is no significant outlier far from a main concentration point in the plot, which further supports the concept of repeatability.

[0200] It should be noted that, while PCA can provide a visual representation for data variability and clustering, PCA cannot replace the statistical testing for quantitatively assessing the repeatability. For comprehensive analysis, an additional statistical method should be adopted.

[0201] FIG. 3 is a histogram of Silhouette scores of PCA for NGS results of three replicated batches. Silhouette analysis was conducted with the PCA results in this figure, and 600 Silhouette scores were obtained, with one Silhouette score for each sample. This histogram shows a distribution of these scores across different ranges or groups.

[0202] Batch effect analysis: Technical repeats can be used for batch effect analysis. A batch effect refers to the fact that a technical difference between different batches may result in significant heterogeneity between data of the different batches. If there is heterogeneity of replicated NGS data, it indicates poor repeatability, that is, there is a batch effect affecting the repeatability. A batch effect can be effectively removed by the batch effect removal software ComBat-seq. Seven batches of data were subjected to Procrustes analysis before and after batch effect removal with ComBat-seq: An output of the Procrustes analysis provided several key pieces of information for comparing PCA results of two groups before and after batch effect removal.

[0203] Biological repeatability: The NGS has high repeatability, indicating that the expression of isomiRs can be accurately quantified. Only the high technical repeatability can guarantee the biological repeatability.

[0204] The NGS method was used to detect plasma isomiRs in 300 gastric cancer samples and 300non-gastric cancer samples (including health and gastric disease samples). Each batch of sequencing involved 100 gastric cancer samples and 100 non-gastric cancer samples (healthy or gastric disease samples). Three NGS replicates were set for each sample (starting from RNA extraction, RT, or cDNA). In order to verify the biological repeatability, the sequencing of a same sample was repeated three or more times. Machine learning models were built with different batches of sequencing results, respectively, and then used to predict for each other. FIG. 1 shows the confusion matrix results of machine learning. A confusion matrix, also known as a contingency table or an error matrix, is a specific matrix to present the performance of a supervised machine learning algorithm. The name “confusion matrix” comes from the fact that a confusion matrix can very easily indicate whether there is confusion between two categories and a confusion degree between two categories.

### EXAMPLE 3

### Construction of a Machine Learning Model

[0205] A t-Test P value of an expression difference of each isomiR between 100 gastric cancer samples and 100 non-gastric cancer samples was calculated, and isomiRs were ranked from small to large according to t-Test P values. 239 isomiRs were selected and correlations among these different isomiRs were further calculated; and then isomiRs highly correlated with other isomiRs were removed. The remaining data were subjected to machine-learning classification with different classifiers to find the optimal classifier. A variety of classifiers were adopted. The data were split by each classifier into two parts: 80% for model training and 20% for model validation. An SVM algorithm was determined to be the optimal.

[0206] A machine learning model for auxiliary diagnosis of gastric cancer was established by the SVM algorithm: The data were divided into two parts: 80% for model training (a training set) and 20% for model validation (a test set). Samples were divided into a training set and a test set. Replicate samples only exist in the training set or the test set, that is, different replicates of a same sample cannot exist in both the training set and the test set, otherwise there will be information leakage and an evaluation of a model will be too high.

[0207] Optimization of an SVM algorithm model: Parameters of the SVM algorithm were debugged to find the optimal parameters. The parameters of the SVM algorithm were optimized through grid search. Numerical ranges of the parameters were as follows: gamma=2⁽⁻⁸⁻¹⁾ and cost=2⁽⁰⁻⁴⁾. In this way, the gamma had 10 values and the cost had 5 values, that is, there were 50 combinations. Each combination was subjected to 10-fold cross-validation, that is, the training set was divided into 10 parts, where 9 parts were used in turn as training data and 1 part was used as test data for trials. Each trial led to a corresponding error rate. An average error rate for each combination was obtained through 10 trials. A gamma/cost combination with a minimum average error rate was determined as the optimal parameters of the SVM algorithm. Since a final diagnosis model was obtained through 500 (50×10) trials, overfitting could be avoided. The overfitting is a phenomenon in which a trained model performs well on a training set but poor on a test set.

[0208] Model evaluation: There are many different indexes to evaluate a machine learning algorithm. Default evaluation criteria for classification problems are accuracy and Kappa. The Kappa is similar to the accuracy, but is calibrated by a random baseline of a data set. A kappa value represents both consistency and classification accuracy. The closer the kappa value to 1, the more excellent the consistency. Usually, a kappa value of 0.75 or more means that a consistency result is satisfactory, and a kappa value of 0.8 to 1 means that results are almost completely consistent. Accuracy, Kappa, and other evaluation indexes could be described by a confusion matrix and an ROC curve.

[0209] FIGS. 4A-4E show the comparison of confusion matrices for machine learning. In order to verify the biological repeatability, the sequencing of a same sample was repeated three or more times in the present disclosure. NGS results of a first batch were used to build a first model, and then the first model was used to predict NGS data of a second batch (a first confusion matrix). Conversely, the NGS data of the second batch were used to build a second model, and then the second model was used to predict the NGS data of the first batch (a second confusion matrix). To demonstrate the high repeatability of multiple times of replicated NGS, the second model established was used to predict NGS data of a third batch (a third confusion matrix). What is more important is whether the machine learning model constructed is universal, that is, whether the machine learning model can be used to predict NGS data of different samples. NGS data of another batch of completely different samples were successfully predicted by the second model above (a fourth confusion matrix). NGS data of a second batch of completely different samples were also successfully predicted by the same model (a fifth confusion matrix).

[0210] Two confusion matrices for mutual authentication both had an accuracy of 95% and a sensitivity and specificity of 90% or more, indicating that NGS data of the two times were highly similar, that is, the biological repeatability was high. NGS data of the third batch (the third confusion matrix) predicted by the second model also had an accuracy of 95% and a sensitivity and specificity of 90% or more, indicating that multiple times of NGS of a same sample had high biological repeatability. What is more important is whether the machine learning model constructed is universal, that is, whether the machine learning model can be used to predict NGS data of different samples. NGS data of another batch of completely different samples were successfully predicted by the second model above (a fourth confusion matrix). NGS data of a second batch of completely different samples were also successfully predicted by the same model (a fifth confusion matrix). While a confusion matrix has lower accuracy, sensitivity, and specificity than the prediction of NGS data of the same samples from different batches, it is expected, and given that a large amount of data is required for modeling by machine learning (because gastric cancer has high genetic heterogeneity), 200 samples are insufficient. However, importantly, P values of confusion matrices are low, indicating that prediction results are very statistically significant and cannot be coincidental. These experimental results fully show that the artificial intelligent diagnosis technology for a tumor based on NGS in the present disclosure can effectively distinguish between gastric cancer and non-gastric cancer diseases (gastritis, gastric ulcer, gastric erosion, and other gastric discomforts), and has excellent biological repeatability (when different samples are adopted). The sensitivity and specificity of prediction by the technology both can reach 90% or more. It indicates that the double unique dual indexing technology for multiplex NGS of the present disclosure has both high technical repeatability and high biological repeatability, and can detect a natural variation of a biological sample, that is, specific detection results. If a detection is not specific, a non-specific signal masks a specific signal, and thus it is impossible to obtain such a specific detection result.

[0211] The above-mentioned NGS results prove from the technical repeatability and the biological repeatability that the NGS library construction technology for isomiRs developed in the present disclosure has high repeatability and can be used for artificial intelligent diagnosis of a tumor.

[0212] The above are merely preferred implementations of the present disclosure. It should be noted that a person of ordinary skill in the art may further make several improvements and modifications without departing from the principle of the present disclosure, but such improvements and modifications should be deemed as falling within the protection scope of the present disclosure.

The application's sequence listing, which the Patent Office published only in electronic form, follows.

SEQUENCE LISTING (2069 sequences)

SEQ ID NO: 1 - DNA, 41 bp, synthetic construct
  source 1..41: mol_type = other DNA
atagactcctcgcatagcctcatgagtctagcttatcagac

SEQ ID NO: 2 - DNA, 40 bp, synthetic construct
  source 1..40: mol_type = other DNA
atagactcctcgcatagcctcatgagtctgtcagtttgtc

SEQ ID NO: 3 - DNA, 40 bp, synthetic construct
  source 1..40: mol_type = other DNA
atagactcctcgcatagcctcatgagtccgtgtatttgac

SEQ ID NO: 4 - DNA, 41 bp, synthetic construct
  source 1..41: mol_type = other DNA
atagactcctcgcatagcctcatgagtccaaagaattctcc

SEQ ID NO: 5 - DNA, 40 bp, synthetic construct
  source 1..40: mol_type = other DNA
atagactcctcgcatagcctcatgagtctaaggtgcatct

SEQ ID NO: 6 - DNA, 42 bp, synthetic construct
  source 1..42: mol_type = other DNA
atagactcctcgcatagcctcatgagtctgagaactgaattc

SEQ ID NO: 7 - DNA, 41 bp, synthetic construct
  source 1..41: mol_type = other DNA
atagactcctcgcatagcctcatgagtctagtaccagtacc

SEQ ID NO: 8 - DNA, 40 bp, synthetic construct
  source 1..40: mol_type = other DNA
atagactcctcgcatagcctcatgagtctaaagtgctgac

SEQ ID NO: 9 - DNA, 43 bp, synthetic construct
  source 1..43: mol_type = other DNA
atagactcctcgcatagcctcatgagtcttataaagcaatgag

SEQ ID NO: 10 - DNA, 42 bp, synthetic construct
  source 1..42: mol_type = other DNA
atagactcctcgcatagcctcatgagtctaaagtgcttatag

SEQ ID NO: 11 - DNA, 39 bp, synthetic construct
  source 1..39: mol_type = other DNA
atagactcctcgcatagcctcatgagtctgccctgagac

SEQ ID NO: 12 - DNA, 39 bp, synthetic construct
  source 1..39: mol_type = other DNA
atagactcctcgcatagcctcatgagtcattgtccttgc

SEQ ID NO: 13 - DNA, 40 bp, synthetic construct
  source 1..40: mol_type = other DNA
atagactcctcgcatagcctcatgagtccagtgcaatagt

SEQ ID NO: 14 - DNA, 44 bp, synthetic construct
  source 1..44: mol_type = other DNA
atagactcctcgcatagcctcatgagtcggatatcatcatatac

SEQ ID NO: 15 - DNA, 40 bp, synthetic construct
  source 1..40: mol_type = other DNA
atagactcctcgcatagcctcatgagtcctagactgaagc

SEQ ID NO: 16 - DNA, 41 bp, synthetic construct
  source 1..41: mol_type = other DNA
atagactcctcgcatagcctcatgagtcaatctgagaaggc

SEQ ID NO: 17 - DNA, 41 bp, synthetic construct
  source 1..41: mol_type = other DNA
atagactcctcgcatagcctcatgagtcaaaaccgtctagt

SEQ ID NO: 18 - DNA, 41 bp, synthetic construct
  source 1..41: mol_type = other DNA
atagactcctcgcatagcctcatgagtctaatccttgctac

SEQ ID NO: 19 - DNA, 38 bp, synthetic construct
  source 1..38: mol_type = other DNA
atagactcctcgcatagcctcatgagtctcggatccgt

SEQ ID NO: 20 - DNA, 41 bp, synthetic construct
  source 1..41: mol_type = other DNA
atagactcctcgcatagcctcatgagtccgaaaacagcaat

SEQ ID NO: 21 - DNA, 40 bp, synthetic construct
  source 1..40: mol_type = other DNA
atagactcctcgcatagcctcatgagtcactctttccctg

SEQ ID NO: 22 - DNA, 38 bp, synthetic construct
  source 1..38: mol_type = other DNA
atagactcctcgcatagcctcatgagtctagcagcggg

SEQ ID NO: 23 - DNA, 77 bp, synthetic construct
  source 1..77: mol_type = other DNA
atagactcctcgcatagcctcatgagtcgcgacccacatagactcctcgcatagcctcatgagtcgaatgttgctcg

SEQ ID NO: 24 - DNA, 40 bp, synthetic construct
  source 1..40: mol_type = other DNA
atagactcctcgcatagcctcatgagtcgaatgttgctcg

SEQ ID NO: 25 - DNA, 39 bp, synthetic construct
  source 1..39: mol_type = other DNA
atagactcctcgcatagcctcatgagtcgcaaagcacac

SEQ ID NO: 26 - DNA, 43 bp, synthetic construct
  source 1..43: mol_type = other DNA
atagactcctcgcatagcctcatgagtcttaatatcggacaac

SEQ ID NO: 27 - DNA, 39 bp, synthetic construct
  source 1..39: mol_type = other DNA
atagactcctcgcatagcctcatgagtcagggggaaagt

SEQ ID NO: 28 - DNA, 40 bp, synthetic construct
  source 1..40: mol_type = other DNA
atagactcctcgcatagcctcatgagtctgtgacagattg

SEQ ID NO: 29 - DNA, 44 bp, synthetic construct
  source 1..44: mol_type = other DNA
atagactcctcgcatagcctcatgagtctaactggttgaacaac

SEQ ID NO: 30 - DNA, 42 bp, synthetic construct
  source 1..42: mol_type = other DNA
atagactcctcgcatagcctcatgagtctatacaagggcaag

SEQ ID NO: 31 - DNA, 40 bp, synthetic construct
  source 1..40: mol_type = other DNA
atagactcctcgcatagcctcatgagtcaaacaaacatgg

SEQ ID NO: 32 - DNA, 41 bp, synthetic construct
  source 1..41: mol_type = other DNA
atagactcctcgcatagcctcatgagtcggcttctttacag

SEQ ID NO: 33 - DNA, 41 bp, synthetic construct
  source 1..41: mol_type = other DNA
atagactcctcgcatagcctcatgagtcttttgcaatatgt

SEQ ID NO: 34 - DNA, 41 bp, synthetic construct
  source 1..41: mol_type = other DNA
atagactcctcgcatagcctcatgagtctaatactgtctgg

SEQ ID NO: 35 - DNA, 42 bp, synthetic construct
  source 1..42: mol_type = other DNA
atagactcctcgcatagcctcatgagtcattctaatttctcc

SEQ ID NO: 36 - DNA, 40 bp, synthetic construct
  source 1..40: mol_type = other DNA
atagactcctcgcatagcctcatgagtctcagtgcatcac

SEQ ID NO: 37 - DNA, 39 bp, synthetic construct
  source 1..39: mol_type = other DNA
atagactcctcgcatagcctcatgagtcaaaagctgggt

SEQ ID NO: 38 - DNA, 38 bp, synthetic construct
  source 1..38: mol_type = other DNA
atagactcctcgcatagcctcatgagtcaccccactcc

SEQ ID NO: 39 - DNA, 38 bp, synthetic construct
  source 1..38: mol_type = other DNA
atagactcctcgcatagcctcatgagtctcgtaccgtg

SEQ ID NO: 40 - DNA, 40 bp, synthetic construct
  source 1..40: mol_type = other DNA
atagactcctcgcatagcctcatgagtctcagtgcatgac

SEQ ID NO: 41 - DNA, 43 bp, synthetic construct
  source 1..43: mol_type = other DNA
atagactcctcgcatagcctcatgagtctacagtatagatgat

SEQ ID NO: 42 - DNA, 39 bp, synthetic construct
  source 1..39: mol_type = other DNA
atagactcctcgcatagcctcatgagtctagcagcacag

SEQ ID NO: 43 - DNA, 40 bp, synthetic construct
  source 1..40: mol_type = other DNA
atagactcctcgcatagcctcatgagtctgaggtagtagg

SEQ ID NO: 44 - DNA, 39 bp, synthetic construct
  source 1..39: mol_type = other DNA
atagactcctcgcatagcctcatgagtcactggacttgg

SEQ ID NO: 45 - DNA, 43 bp, synthetic construct
  source 1..43: mol_type = other DNA
atagactcctcgcatagcctcatgagtccattattacttttgg

SEQ ID NO: 46 - DNA, 42 bp, synthetic construct
  source 1..42: mol_type = other DNA
atagactcctcgcatagcctcatgagtcttcaagtaatccag

SEQ ID NO: 47 - DNA, 40 bp, synthetic construct
  source 1..40: mol_type = other DNA
atagactcctcgcatagcctcatgagtctagcaccatctg

SEQ ID NO: 48 - DNA, 40 bp, synthetic construct
  source 1..40: mol_type = other DNA
atagactcctcgcatagcctcatgagtcaacattcaacgc

SEQ ID NO: 49 - DNA, 41 bp, synthetic construct
  source 1..41: mol_type = other DNA
atagactcctcgcatagcctcatgagtctattgcacattac

SEQ ID NO: 50 - DNA, 40 bp, synthetic construct
  source 1..40: mol_type = other DNA
atagactcctcgcatagcctcatgagtctgtagtgtttcc

SEQ ID NO: 51 - DNA, 40 bp, synthetic construct
  source 1..40: mol_type = other DNA
atagactcctcgcatagcctcatgagtctagcaccatttg

SEQ ID NO: 52 - DNA, 40 bp, synthetic construct
  source 1..40: mol_type = other DNA
atagactcctcgcatagcctcatgagtccagcagcaattc

SEQ ID NO: 53 - DNA, 41 bp, synthetic construct
  source 1..41: mol_type = other DNA
atagactcctcgcatagcctcatgagtcctgacctatgaat

SEQ ID NO: 54 - DNA, 41 bp, synthetic construct
  source 1..41: mol_type = other DNA
atagactcctcgcatagcctcatgagtctgagatgaagcac

SEQ ID NO: 55 - DNA, 41 bp, synthetic construct
  source 1..41: mol_type = other DNA
atagactcctcgcatagcctcatgagtctgtaaacatccta

SEQ ID NO: 56 - DNA, 42 bp, synthetic construct; identical to SEQ ID NO: 6
  source 1..42: mol_type = other DNA

SEQ ID NO: 57 - DNA, 42 bp, synthetic construct
  source 1..42: mol_type = other DNA
atagactcctcgcatagcctcatgagtctacagtactgtgat

SEQ ID NO: 58 - DNA, 39 bp, synthetic construct
  source 1..39: mol_type = other DNA
atagactcctcgcatagcctcatgagtctgtgcaaatcc

SEQ ID NO: 59 - DNA, 39 bp, synthetic construct
  source 1..39: mol_type = other DNA
atagactcctcgcatagcctcatgagtcgtgcattgctg

SEQ ID NO: 60 - DNA, 39 bp, synthetic construct; identical to SEQ ID NO: 44
  source 1..39: mol_type = other DNA

SEQ ID NO: 61 - DNA, 39 bp, synthetic construct
  source 1..39: mol_type = other DNA
atagactcctcgcatagcctcatgagtcaagctgccagt

SEQ ID NO: 62 - DNA, 39 bp, synthetic construct
  source 1..39: mol_type = other DNA
atagactcctcgcatagcctcatgagtcagcagcattgt

SEQ ID NO: 63 - DNA, 37 bp, synthetic construct
  source 1..37: mol_type = other DNA
atagactcctcgcatagcctcatgagtccagcagcac

SEQ ID NO: 64 - DNA, 40 bp, synthetic construct
  source 1..40: mol_type = other DNA
atagactcctcgcatagcctcatgagtccaggccatattg

SEQ ID NO: 65 - DNA, 40 bp, synthetic construct
  source 1..40: mol_type = other DNA
atagactcctcgcatagcctcatgagtccatcccttgcat

SEQ ID NO: 66 - DNA, 40 bp, synthetic construct
  source 1..40: mol_type = other DNA
atagactcctcgcatagcctcatgagtcctatacgacctg

SEQ ID NO: 67 - DNA, 41 bp, synthetic construct
  source 1..41: mol_type = other DNA
atagactcctcgcatagcctcatgagtctaacagtctacag

SEQ ID NO: 68 - DNA, 39 bp, synthetic construct
  source 1..39: mol_type = other DNA
atagactcctcgcatagcctcatgagtctcgaggagctc

SEQ ID NO: 69 - DNA, 40 bp, synthetic construct
  source 1..40: mol_type = other DNA
atagactcctcgcatagcctcatgagtctgtaacagcaac

SEQ ID NO: 70 - DNA, 41 bp, synthetic construct
  source 1..41: mol_type = other DNA
atagactcctcgcatagcctcatgagtcaacccgtagatcc

SEQ ID NO: 71 - DNA, 39 bp, synthetic construct
  source 1..39: mol_type = other DNA
atagactcctcgcatagcctcatgagtctccctgagacc

SEQ ID NO: 72 - DNA, 40 bp, synthetic construct
  source 1..40: mol_type = other DNA
atagactcctcgcatagcctcatgagtccattgcacttgt

SEQ ID NO: 73 - DNA, 39 bp, synthetic construct; identical to SEQ ID NO: 62
  source 1..39: mol_type = other DNA

SEQ ID NO: 74 - DNA, 38 bp, synthetic construct
  source 1..38: mol_type = other DNA
atagactcctcgcatagcctcatgagtctctgggcaac

SEQ ID NO: 75 - DNA, 37 bp, synthetic construct
  source 1..37: mol_type = other DNA
atagactcctcgcatagcctcatgagtcttcccagcc

SEQ ID NO: 76 - DNA, 41 bp, synthetic construct; identical to SEQ ID NO: 55
  source 1..41: mol_type = other DNA

SEQ ID NO: 77 - DNA, 39 bp, synthetic construct
  source 1..39: mol_type = other DNA
atagactcctcgcatagcctcatgagtcaattgcacggt

SEQ ID NO: 78 - DNA, 39 bp, synthetic construct
  source 1..39: mol_type = other DNA
atagactcctcgcatagcctcatgagtccaaagtgctgt

SEQ ID NO: 79 - DNA, 40 bp, synthetic construct
  source 1..40: mol_type = other DNA
atagactcctcgcatagcctcatgagtctttgttcgttcg

SEQ ID NO: 80 - DNA, 39 bp, synthetic construct
  source 1..39: mol_type = other DNA
atagactcctcgcatagcctcatgagtccacccgtagaa

SEQ ID NO: 81 - DNA, 38 bp, synthetic construct
  source 1..38: mol_type = other DNA
atagactcctcgcatagcctcatgagtcaactggccct

SEQ ID NO: 82 - DNA, 37 bp, synthetic construct
  source 1..37: mol_type = other DNA
atagactcctcgcatagcctcatgagtcactgcccca

SEQ ID NO: 83 - DNA, 39 bp, synthetic construct
  source 1..39: mol_type = other DNA
atagactcctcgcatagcctcatgagtcaactggcctac

SEQ ID NO: 84 - DNA, 38 bp, synthetic construct
  source 1..38: mol_type = other DNA
atagactcctcgcatagcctcatgagtctctcacacag

SEQ ID NO: 85 - DNA, 39 bp, synthetic construct
  source 1..39: mol_type = other DNA
atagactcctcgcatagcctcatgagtctcaggctcagt

SEQ ID NO: 86 - DNA, 38 bp, synthetic construct
  source 1..38: mol_type = other DNA
atagactcctcgcatagcctcatgagtccctcccacac

SEQ ID NO: 87 - DNA, 38 bp, synthetic construct
  source 1..38: mol_type = other DNA
atagactcctcgcatagcctcatgagtcctgtgcgtgt

SEQ ID NO: 88 - DNA, 39 bp, synthetic construct
  source 1..39: mol_type = other DNA
atagactcctcgcatagcctcatgagtcttggggaaacg

SEQ ID NO: 89 - DNA, 37 bp, synthetic construct
  source 1..37: mol_type = other DNA
atagactcctcgcatagcctcatgagtcagggccccc

SEQ ID NO: 90 - DNA, 38 bp, synthetic construct
  source 1..38: mol_type = other DNA
atagactcctcgcatagcctcatgagtctcgaccggac

SEQ ID NO: 91 - DNA, 40 bp, synthetic construct
  source 1..40: mol_type = other DNA
atagactcctcgcatagcctcatgagtctgtgcaaatcta

SEQ ID NO: 92 - DNA, 40 bp, synthetic construct
  source 1..40: mol_type = other DNA
atagactcctcgcatagcctcatgagtctctacagtgcac

SEQ ID NO: 93 - DNA, 38 bp, synthetic construct
  source 1..38: mol_type = other DNA
atagactcctcgcatagcctcatgagtcagcaggtgcg

SEQ ID NO: 94 - DNA, 40 bp, synthetic construct
  source 1..40: mol_type = other DNA
atagactcctcgcatagcctcatgagtctaccacagggta

SEQ ID NO: 95 - DNA, 39 bp, synthetic construct
  source 1..39: mol_type = other DNA
atagactcctcgcatagcctcatgagtcggatccgagtc

SEQ ID NO: 96 - DNA, 40 bp, synthetic construct; identical to SEQ ID NO: 43
  source 1..40: mol_type = other DNA

SEQ ID NO: 97 - DNA, 42 bp, synthetic construct
  source 1..42: mol_type = other DNA
atagactcctcgcatagcctcatgagtcaaaagtgcttacag

SEQ ID NO: 98 - DNA, 28 bp, synthetic construct
  source 1..28: mol_type = other DNA
aatgatacggcgaccaccgagatctaca

SEQ ID NO: 99 - DNA, 58 bp, synthetic construct
  source 1..58: mol_type = other DNA
tctacagatcctggcctctgactccaggatctgtagacctccatccgagacacacgat

SEQ ID NO: 100 - DNA, 68 bp, synthetic construct
  source 1..68: mol_type = other DNA
gtttgttgctacgctcagaatcctaagcgtagcaacaaacatagactcctcgcatagcctcatgagtc

SEQ ID NO: 101 - DNA, 25 bp, synthetic construct
  source 1..25: mol_type = other DNA
cagaatcctaagcgtagcaacaaac

SEQ ID NO: 102 - DNA, 25 bp, synthetic construct
  source 1..25: mol_type = other DNA
gcctctgactccaggatctgtagac

SEQ ID NO: 103 - DNA, 10 bp, synthetic construct
  source 1..10: mol_type = other DNA
tcagtatcct

SEQ ID NO: 104 - DNA, 10 bp, synthetic construct
  source 1..10: mol_type = other DNA
gccgaatagc

SEQ ID NO: 105 - DNA, 10 bp, synthetic construct
  source 1..10: mol_type = other DNA
ttaccagact

SEQ ID NO: 106 - DNA, 10 bp, synthetic construct
  source 1..10: mol_type = other DNA
ttcgcagctt

SEQ ID NO: 107 - DNA, 10 bp, synthetic construct
  source 1..10: mol_type = other DNA
tcgcaatctt

SEQ ID NO: 108 - DNA, 10 bp, synthetic construct
  source 1..10: mol_type = other DNA
tgcctgatag

SEQ ID NO: 109 - DNA, 10 bp, synthetic construct
  source 1..10: mol_type = other DNA
tgacgactct

SEQ ID NO: 110 - DNA, 10 bp, synthetic construct
  source 1..10: mol_type = other DNA
gcatagaccg

SEQ ID NO: 111 - DNA, 10 bp, synthetic construct
  source 1..10: mol_type = other DNA
ttccgcgctt

SEQ ID NO: 112 - DNA, 10 bp, synthetic construct
  source 1..10: mol_type = other DNA
gattgctgac

SEQ ID NO: 113 - DNA, 10 bp, synthetic construct
  source 1..10: mol_type = other DNA
gacatagacg

SEQ ID NO: 114 - DNA, 10 bp, synthetic construct
  source 1..10: mol_type = other DNA
gaacctaatc

SEQ ID NO: 115 - DNA, 10 bp, synthetic construct
  source 1..10: mol_type = other DNA
gtagtaagac

SEQ ID NO: 116 - DNA, 10 bp, synthetic construct
  source 1..10: mol_type = other DNA
tgcagttctt

SEQ ID NO: 117 - DNA, 10 bp, synthetic construct
  source 1..10: mol_type = other DNA
ttaacattac

SEQ ID NO: 118 - DNA, 10 bp, synthetic construct
  source 1..10: mol_type = other DNA
gaactcacgc

SEQ ID NO: 119 - DNA, 10 bp, synthetic construct
  source 1..10: mol_type = other DNA
gacgcgcaga

SEQ ID NO: 120 - DNA, 10 bp, synthetic construct
  source 1..10: mol_type = other DNA
ggttccttag

SEQ ID NO: 121 - DNA, 10 bp, synthetic construct
  source 1..10: mol_type = other DNA
tccggcacac

SEQ ID NO: 122 - DNA, 10 bp, synthetic construct
  source 1..10: mol_type = other DNA
gcctaacttc

SEQ ID NO: 123 - DNA, 10 bp, synthetic construct
  source 1..10: mol_type = other DNA
cagcacaaga

SEQ ID NO: 124 - DNA, 10 bp, synthetic construct
  source 1..10: mol_type = other DNA
tagcagctca

SEQ ID NO: 125 - DNA, 10 bp, synthetic construct
  source 1..10: mol_type = other DNA
acgcgccaga

SEQ ID NO: 126 - DNA, 10 bp, synthetic construct
  source 1..10: mol_type = other DNA
actcttggtt

SEQ ID NO: 127 - DNA, 10 bp, synthetic construct
  source 1..10: mol_type = other DNA
ttaatcttca

SEQ ID NO: 128 - DNA, 10 bp, synthetic construct
  source 1..10: mol_type = other DNA
tcattattat

SEQ ID NO: 129 - DNA, 10 bp, synthetic construct
  source 1..10: mol_type = other DNA
gctcacgcac

SEQ ID NO: 130 - DNA, 10 bp, synthetic construct
  source 1..10: mol_type = other DNA
tgtgactgtg

SEQ ID NO: 131 - DNA, 10 bp, synthetic construct
  source 1..10: mol_type = other DNA
ttaactctcg

SEQ ID NO: 132 - DNA, 10 bp, synthetic construct
  source 1..10: mol_type = other DNA
ttacggcgca

SEQ ID NO: 133 - DNA, 10 bp, synthetic construct
  source 1..10: mol_type = other DNA
ttctcgccac

SEQ ID NO: 134 - DNA, 10 bp, synthetic construct
  source 1..10: mol_type = other DNA
ggctcctacg

SEQ ID NO: 135 - DNA, 10 bp, synthetic construct
  source 1..10: mol_type = other DNA
gactgccgcg

SEQ ID NO: 136 - DNA, 10 bp, synthetic construct
  source 1..10: mol_type = other DNA
gacagttctc

SEQ ID NO: 137 - DNA, 10 bp, synthetic construct
  source 1..10: mol_type = other DNA
tgtccatcat

SEQ ID NO: 138 - DNA, 10 bp, synthetic construct
  source 1..10: mol_type = other DNA
gaccgctaag

SEQ ID NO: 139 - DNA, 10 bp, synthetic construct
  source 1..10: mol_type = other DNA
gctcgaataa

SEQ ID NO: 140 - DNA, 10 bp, synthetic construct
  source 1..10: mol_type = other DNA
tggtcagtcg

SEQ ID NO: 141 - DNA, 10 bp, synthetic construct
  source 1..10: mol_type = other DNA
ggttactctg

SEQ ID NO: 142 - DNA, 10 bp, synthetic construct
  source 1..10: mol_type = other DNA
caacagttcg

SEQ ID NO: 143 - DNA, 10 bp, synthetic construct
  source 1..10: mol_type = other DNA
tggcagtggt

SEQ ID NO: 144 - DNA, 10 bp, synthetic construct
  source 1..10: mol_type = other DNA
tgttctgacg

SEQ ID NO: 145 - DNA, 10 bp, synthetic construct
  source 1..10: mol_type = other DNA
caacacgatc

SEQ ID NO: 146 - DNA, 10 bp, synthetic construct
  source 1..10: mol_type = other DNA
catcaatcat

SEQ ID NO: 147 - DNA, 10 bp, synthetic construct
  source 1..10: mol_type = other DNA
gcactcctta

SEQ ID NO: 148 - DNA, 10 bp, synthetic construct
  source 1..10: mol_type = other DNA
agcatccaga

SEQ ID NO: 149 - DNA, 10 bp, synthetic construct
  source 1..10: mol_type = other DNA
cactgcatac

SEQ ID NO: 150 - DNA, 10 bp, synthetic construct
  source 1..10: mol_type = other DNA
ggtgcagacg

SEQ ID NO: 151 - DNA, 10 bp, synthetic construct
  source 1..10: mol_type = other DNA
cgcaacgccg

SEQ ID NO: 152 - DNA, 10 bp, synthetic construct
  source 1..10: mol_type = other DNA
aagactctga

SEQ ID NO: 153 - DNA, 10 bp, synthetic construct
  source 1..10: mol_type = other DNA
tgcctctaat

SEQ ID NO: 154 - DNA, 10 bp, synthetic construct
  source 1..10: mol_type = other DNA
cgcagtacgc

SEQ ID NO: 155 - DNA, 10 bp, synthetic construct
  source 1..10: mol_type = other DNA
cattgcttgg

SEQ ID NO: 156 - DNA, 10 bp, synthetic construct
  source 1..10: mol_type = other DNA
gtaagatatt

SEQ ID NO: 157 - DNA, 10 bp, synthetic construct
  source 1..10: mol_type = other DNA
ggaacagact

SEQ ID NO: 158 - DNA, 10 bp, synthetic construct
  source 1..10: mol_type = other DNA
gtaagaccgg

SEQ ID NO: 159 - DNA, 10 bp, synthetic construct
  source 1..10: mol_type = other DNA
tgcctaagtc

SEQ ID NO: 160 - DNA, 10 bp, synthetic construct
  source 1..10: mol_type = other DNA
tagacatatt

SEQ ID NO: 161 - DNA, 10 bp, synthetic construct
  source 1..10: mol_type = other DNA
gacttatcct

SEQ ID NO: 162 - DNA, 10 bp, synthetic construct
  source 1..10: mol_type = other DNA
tcgcatcgaa

SEQ ID NO: 163 - DNA, 10 bp, synthetic construct
  source 1..10: mol_type = other DNA
acttagttac

SEQ ID NO: 164 - DNA, 10 bp, synthetic construct
  source 1..10: mol_type = other DNA
tcacagtcac

SEQ ID NO: 165 - DNA, 10 bp, synthetic construct
  source 1..10: mol_type = other DNA
ggcctcttgg

SEQ ID NO: 166 - DNA, 10 bp, synthetic construct
  source 1..10: mol_type = other DNA
gtagaccaat

SEQ ID NO: 167 - DNA, 10 bp, synthetic construct
  source 1..10: mol_type = other DNA
gtaatatcag

SEQ ID NO: 168 - DNA, 10 bp, synthetic construct
  source 1..10: mol_type = other DNA
aattcgatgc

SEQ ID NO: 169 - DNA, 10 bp, synthetic construct
  source 1..10: mol_type = other DNA
gctgcgctac

SEQ ID NO: 170 - DNA, 10 bp, synthetic construct
  source 1..10: mol_type = other DNA
gatgtccttc

SEQ ID NO: 171 - DNA, 10 bp, synthetic construct
  source 1..10: mol_type = other DNA
aactcttgtg

SEQ ID NO: 172 - DNA, 10 bp, synthetic construct
  source 1..10: mol_type = other DNA
gcgccgcgct

SEQ ID NO: 173 - DNA, 10 bp, synthetic construct
  source 1..10: mol_type = other DNA
tagactactc

SEQ ID NO: 174 - DNA, 10 bp, synthetic construct
  source 1..10: mol_type = other DNA
tcctgacaca

SEQ ID NO: 175 - DNA, 10 bp, synthetic construct
  source 1..10: mol_type = other DNA
gaataccaag

SEQ ID NO: 176 - DNA, 10 bp, synthetic construct
  source 1..10: mol_type = other DNA
gcctgccgac

SEQ ID NO: 177 - DNA, 10 bp, synthetic construct
  source 1..10: mol_type = other DNA
tggccgatac

SEQ ID NO: 178 - DNA, 10 bp, synthetic construct
  source 1..10: mol_type = other DNA
tccgacgtat

SEQ ID NO: 179 - DNA, 10 bp, synthetic construct
  source 1..10: mol_type = other DNA
acagttacta

SEQ ID NO: 180 - DNA, 10 bp, synthetic construct
  source 1..10: mol_type = other DNA
gcacctagac

SEQ ID NO: 181 - DNA, 10 bp, synthetic construct
  source 1..10: mol_type = other DNA
actacgtcct

SEQ ID NO: 182 - DNA, 10 bp, synthetic construct
  source 1..10: mol_type = other DNA
ctcattattc

SEQ ID NO: 183 - DNA, 10 bp, synthetic construct
  source 1..10: mol_type = other DNA
tgacacaact

SEQ ID NO: 184 - DNA, 10 bp, synthetic construct
  source 1..10: mol_type = other DNA
gagaatagct

SEQ ID NO: 185 - DNA, 10 bp, synthetic construct
  source 1..10: mol_type = other DNA
gatgcctcaa

SEQ ID NO: 186 - DNA, 10 bp, synthetic construct
  source 1..10: mol_type = other DNA
gagacactgc

SEQ ID NO: 187 - DNA, 10 bp, synthetic construct
  source 1..10: mol_type = other DNA
acactgctct

SEQ ID NO: 188 - DNA, 10 bp, synthetic construct
  source 1..10: mol_type = other DNA
gaatgttacc

SEQ ID NO: 189 - DNA, 10 bp, synthetic construct
  source 1..10: mol_type = other DNA
gcgcgaagcc

SEQ ID NO: 190 - DNA, 10 bp, synthetic construct
  source 1..10: mol_type = other DNA
tgtgcgccga

SEQ ID NO: 191 - DNA, 10 bp, synthetic construct
  source 1..10: mol_type = other DNA
agctgcactg

SEQ ID NO: 192 - DNA, 10 bp, synthetic construct
  source 1..10: mol_type = other DNA
gacctaatct

SEQ ID NO: 193 - DNA, 10 bp, synthetic construct
  source 1..10: mol_type = other DNA
tctagctgct

SEQ ID NO: 194 - DNA, 10 bp, synthetic construct
  source 1..10: mol_type = other DNA
ttgccacgcg

SEQ ID NO: 195 - DNA, 10 bp, synthetic construct
  source 1..10: mol_type = other DNA
ggattagcga

SEQ ID NO: 196 - DNA, 10 bp, synthetic construct
  source 1..10: mol_type = other DNA
gcgctctcat

SEQ ID NO: 197 - DNA, 10 bp, synthetic construct
  source 1..10: mol_type = other DNA
gagctactcc

SEQ ID NO: 198 - DNA, 10 bp, synthetic construct
  source 1..10: mol_type = other DNA
tcgcactggc

SEQ ID NO: 199 - DNA, 10 bp, synthetic construct
  source 1..10: mol_type = other DNA
gaagttctct

SEQ ID NO: 200 - DNA, 10 bp, synthetic construct
  source 1..10: mol_type = other DNA
acattaagtg

SEQ ID NO: 201 - DNA, 10 bp, synthetic construct
  source 1..10: mol_type = other DNA
gctcctcaga

SEQ ID NO: 202 - DNA, 10 bp, synthetic construct
  source 1..10: mol_type = other DNA
cagatgtacg

SEQ ID NO: 203 - DNA, 10 bp, synthetic construct
  source 1..10: mol_type = other DNA
atcctcagct

SEQ ID NO: 204 - DNA, 10 bp, synthetic construct
  source 1..10: mol_type = other DNA
ctctgccaac

SEQ ID NO: 205 - DNA, 10 bp, synthetic construct
  source 1..10: mol_type = other DNA
gtggcaagcc

SEQ ID NO: 206 - DNA, 10 bp, synthetic construct
  source 1..10: mol_type = other DNA
gaagttgacg

SEQ ID NO: 207 - DNA, 10 bp, synthetic construct
  source 1..10: mol_type = other DNA
actcgttccg

SEQ ID NO: 208 - DNA, 10 bp, synthetic construct
  source 1..10: mol_type = other DNA
ggcttggtcg

SEQ ID NO: 209 - DNA, 10 bp, synthetic construct
  source 1..10: mol_type = other DNA
agccttctag

SEQ ID NO: 210 - DNA, 10 bp, synthetic construct
  source 1..10: mol_type = other DNA
tctactgctt

SEQ ID NO: 211 - DNA, 10 bp, synthetic construct
  source 1..10: mol_type = other DNA
acctcaatac

SEQ ID NO: 212 - DNA, 10 bp, synthetic construct
  source 1..10: mol_type = other DNA
gctctcaact

SEQ ID NO: 213 - DNA, 10 bp, synthetic construct
  source 1..10: mol_type = other DNA
tctcttcaag

SEQ ID NO: 214 - DNA, 10 bp, synthetic construct
  source 1..10: mol_type = other DNA
tcggacggtg

SEQ ID NO: 215 - DNA, 10 bp, synthetic construct
  source 1..10: mol_type = other DNA
cgctctccaa

SEQ ID NO: 216 - DNA, 10 bp, synthetic construct
  source 1..10: mol_type = other DNA
gtaagcggtt

SEQ ID NO: 217 - DNA, 10 bp, synthetic construct
  source 1..10: mol_type = other DNA
gcattgaagc

SEQ ID NO: 218 - DNA, 10 bp, synthetic construct
  source 1..10: mol_type = other DNA
atatcaagca

SEQ ID NO: 219 - DNA, 10 bp, synthetic construct
  source 1..10: mol_type = other DNA
atcctagcgc

SEQ ID NO: 220 - DNA, 10 bp, synthetic construct
  source 1..10: mol_type = other DNA
tagttgttgt

SEQ ID NO: 221 - DNA, 10 bp, synthetic construct
  source 1..10: mol_type = other DNA
tcgtcctacg

SEQ ID NO: 222 - DNA, 10 bp, synthetic construct
  source 1..10: mol_type = other DNA
cgaacgatct

SEQ ID NO: 223 - DNA, 10 bp, synthetic construct
  source 1..10: mol_type = other DNA
ttacaacaca

SEQ ID NO: 224 - DNA, 10 bp, synthetic construct
  source 1..10: mol_type = other DNA
tctgacgaca

SEQ ID NO: 225 - DNA, 10 bp, synthetic construct
  source 1..10: mol_type = other DNA
tctgaatctg

SEQ ID NO: 226 - DNA, 10 bp, synthetic construct
  source 1..10: mol_type = other DNA
ttattgaata

SEQ ID NO: 227 - DNA, 10 bp, synthetic construct
  source 1..10: mol_type = other DNA
aggaccacgc

SEQ ID NO: 228 - DNA, 10 bp, synthetic construct
  source 1..10: mol_type = other DNA
ctccaccgat

SEQ ID NO: 229 - DNA, 10 bp, synthetic construct
  source 1..10: mol_type = other DNA
gatggtgacc

SEQ ID NO: 230 - DNA, 10 bp, synthetic construct
  source 1..10: mol_type = other DNA
ttagtgtcaa

SEQ ID NO: 231 - DNA, 10 bp, synthetic construct
  source 1..10: mol_type = other DNA
gttcttcatg

SEQ ID NO: 232 - DNA, 10 bp, synthetic construct
  source 1..10: mol_type = other DNA
tcaggtgatc

SEQ ID NO: 233 - DNA, 10 bp, synthetic construct
  source 1..10: mol_type = other DNA
ctctcattga

SEQ ID NO: 234 - DNA, 10 bp, synthetic construct
  source 1..10: mol_type = other DNA
gcaagtggtc

SEQ ID NO: 235 - DNA, 10 bp, synthetic construct
  source 1..10: mol_type = other DNA
accagtactt

SEQ ID NO: 236 - DNA, 10 bp, synthetic construct
  source 1..10: mol_type = other DNA
gtgctaatcg

SEQ ID NO: 237 - DNA, 10 bp, synthetic construct
  source 1..10: mol_type = other DNA
tcacgtactc

SEQ ID NO: 238 - DNA, 10 bp, synthetic construct
  source 1..10: mol_type = other DNA
agccgcgcac

SEQ ID NO: 239 - DNA, 10 bp, synthetic construct
  source 1..10: mol_type = other DNA
gcaacaatta

SEQ ID NO: 240 - DNA, 10 bp, synthetic construct
  source 1..10: mol_type = other DNA
gaatcgacgg

SEQ ID NO: 241 - DNA, 10 bp, synthetic construct
  source 1..10: mol_type = other DNA
atctagctct

SEQ ID NO: 242 - DNA, 10 bp, synthetic construct
  source 1..10: mol_type = other DNA
aactgaacgt

SEQ ID NO: 243 - DNA, 10 bp, synthetic construct
  source 1..10: mol_type = other DNA
ggagcagcac

SEQ ID NO: 244 - DNA, 10 bp, synthetic construct
  source 1..10: mol_type = other DNA
gcggaacgcc

SEQ ID NO: 245 - DNA, 10 bp, synthetic construct
  source 1..10: mol_type = other DNA
gttacatgcc

SEQ ID NO: 246 - DNA, 10 bp, synthetic construct
  source 1..10: mol_type = other DNA
gttggcagac

SEQ ID NO: 247 - DNA, 10 bp, synthetic construct
  source 1..10: mol_type = other DNA
agttattgtt

SEQ ID NO: 248 - DNA, 10 bp, synthetic construct
  source 1..10: mol_type = other DNA
tcgatgctta

SEQ ID NO: 249 - DNA, 10 bp, synthetic construct
  source 1..10: mol_type = other DNA
gttgctctaa

SEQ ID NO: 250 - DNA, 10 bp, synthetic construct
  source 1..10: mol_type = other DNA
gacagaagac

SEQ ID NO: 251 - DNA, 10 bp, synthetic construct
  source 1..10: mol_type = other DNA
tctctgccat

SEQ ID NO: 252 - DNA, 10 bp, synthetic construct
  source 1..10: mol_type = other DNA
gattcgttcc

SEQ ID NO: 253 - DNA, 10 bp, synthetic construct
  source 1..10: mol_type = other DNA
gtaatgaact

SEQ ID NO: 254 - DNA, 10 bp, synthetic construct
  source 1..10: mol_type = other DNA
agacatacca

SEQ ID NO: 255 - DNA, 10 bp, synthetic construct
  source 1..10: mol_type = other DNA
atcaactgag

SEQ ID NO: 256 - DNA, 10 bp, synthetic construct
  source 1..10: mol_type = other DNA
ctggactcga

SEQ ID NO: 257 - DNA, 10 bp, synthetic construct
  source 1..10: mol_type = other DNA
gaactagagc

SEQ ID NO: 258 - DNA, 10 bp, synthetic construct
  source 1..10: mol_type = other DNA
gatcaacagc

SEQ ID NO: 259 - DNA, 10 bp, synthetic construct
  source 1..10: mol_type = other DNA
gcgtagccga

SEQ ID NO: 260 - DNA, 10 bp, synthetic construct
  source 1..10: mol_type = other DNA
tgcacaatgg

SEQ ID NO: 261 - DNA, 10 bp, synthetic construct
  source 1..10: mol_type = other DNA
ggtatcttgc

SEQ ID NO: 262 - DNA, 10 bp, synthetic construct
  source 1..10: mol_type = other DNA
tctaactgta

SEQ ID NO: 263 - DNA, 10 bp, synthetic construct
  source 1..10: mol_type = other DNA
cgcgctactt

SEQ ID NO: 264 - DNA, 10 bp, synthetic construct
  source 1..10: mol_type = other DNA
gttaatgagc

SEQ ID NO: 265 - DNA, 10 bp, synthetic construct
  source 1..10: mol_type = other DNA
aacacaatgc

SEQ ID NO: 266 - DNA, 10 bp, synthetic construct
  source 1..10: mol_type = other DNA
gccggtcgcg

SEQ ID NO: 267 - DNA, 10 bp, synthetic construct
  source 1..10: mol_type = other DNA
tagaagtgct

SEQ ID NO: 268 - DNA, 10 bp, synthetic construct
  source 1..10: mol_type = other DNA
agtagcgcgg

SEQ ID NO: 269 - DNA, 10 bp, synthetic construct
  source 1..10: mol_type = other DNA
tgcacgttca

SEQ ID NO: 270 - DNA, 10 bp, synthetic construct
  source 1..10: mol_type = other DNA
tagcaactat

SEQ ID NO: 271 - DNA, 10 bp, synthetic construct
  source 1..10: mol_type = other DNA
gaccgcgttc

SEQ ID NO: 272 - DNA, 10 bp, synthetic construct
  source 1..10: mol_type = other DNA
gagtgacgat

SEQ ID NO: 273 - DNA, 10 bp, synthetic construct
  source 1..10: mol_type = other DNA
gctactactg

SEQ ID NO: 274 - DNA, 10 bp, synthetic construct
  source 1..10: mol_type = other DNA
aagcaaggtc

SEQ ID NO: 275 - DNA, 10 bp, synthetic construct
  source 1..10: mol_type = other DNA
tgtcttcggt

SEQ ID NO: 276 - DNA, 10 bp, synthetic construct
  source 1..10: mol_type = other DNA
cgcgctaacc

SEQ ID NO: 277 - DNA, 10 bp, synthetic construct
  source 1..10: mol_type = other DNA
cagttctgaa

SEQ ID NO: 278 - DNA, 10 bp, synthetic construct
  source 1..10: mol_type = other DNA
acgttactag

SEQ ID NO: 279 - DNA, 10 bp, synthetic construct
  source 1..10: mol_type = other DNA
gagacggaat

SEQ ID NO: 280 - DNA, 10 bp, synthetic construct
  source 1..10: mol_type = other DNA
tagcttgcgc

SEQ ID NO: 281 - DNA, 10 bp, synthetic construct
  source 1..10: mol_type = other DNA
gcaagtgaca

SEQ ID NO: 282 - DNA, 10 bp, synthetic construct
  source 1..10: mol_type = other DNA
tcgcaggtat

SEQ ID NO: 283 - DNA, 10 bp, synthetic construct
  source 1..10: mol_type = other DNA
cttgcacgaa

SEQ ID NO: 284 - DNA, 10 bp, synthetic construct
  source 1..10: mol_type = other DNA
agtggaacta

SEQ ID NO: 285 - DNA, 10 bp, synthetic construct
  source 1..10: mol_type = other DNA
ggataactat

SEQ ID NO: 286 - DNA, 10 bp, synthetic construct
  source 1..10: mol_type = other DNA
gcctggtgtg

SEQ ID NO: 287 - DNA, 10 bp, synthetic construct
  source 1..10: mol_type = other DNA
atcgctccaa

SEQ ID NO: 288 - DNA, 10 bp, synthetic construct
  source 1..10: mol_type = other DNA
gttgctgtgc

SEQ ID NO: 289 - DNA, 10 bp, synthetic construct
  source 1..10: mol_type = other DNA
ttaagtgcgc

SEQ ID NO: 290 - DNA, 10 bp, synthetic construct
  source 1..10: mol_type = other DNA
gtagctggac

SEQ ID NO: 291 - DNA, 10 bp, synthetic construct
  source 1..10: mol_type = other DNA
gctccacgtt

SEQ ID NO: 292 - DNA, 10 bp, synthetic construct
  source 1..10: mol_type = other DNA
gatgctcatt

SEQ ID NO: 293 - DNA, 10 bp, synthetic construct
  source 1..10: mol_type = other DNA
tcagcggcta

SEQ ID NO: 294 - DNA, 10 bp, synthetic construct
  source 1..10: mol_type = other DNA
ttgcctcgtc

SEQ ID NO: 295 - DNA, 10 bp, synthetic construct
  source 1..10: mol_type = other DNA
acctccgaac

SEQ ID NO: 296 - DNA, 10 bp, synthetic construct
  source 1..10: mol_type = other DNA
cgatccatat

SEQ ID NO: 297 - DNA, 10 bp, synthetic construct
  source 1..10: mol_type = other DNA
tcctcgatcg

SEQ ID NO: 298 - DNA, 10 bp, synthetic construct
  source 1..10: mol_type = other DNA
ggcggacaca

SEQ ID NO: 299 - DNA, 10 bp, synthetic construct
  source 1..10: mol_type = other DNA
ggctccgcta

SEQ ID NO: 300 - DNA, 10 bp, synthetic construct
  source 1..10: mol_type = other DNA
agtggtagcg

SEQ ID NO: 301 - DNA, 10 bp, synthetic construct
  source 1..10: mol_type = other DNA
ggctcacgtt

SEQ ID NO: 302 - DNA, 10 bp, synthetic construct
  source 1..10: mol_type = other DNA
ggatcttgct

SEQ ID NO: 303 - DNA, 10 bp, synthetic construct
  source 1..10: mol_type = other DNA
aacacctggt

SEQ ID NO: 304 - DNA, 10 bp, synthetic construct
  source 1..10: mol_type = other DNA
gagctgtaag

SEQ ID NO: 305 - DNA, 10 bp, synthetic construct
  source 1..10: mol_type = other DNA
gtatgtgcag

SEQ ID NO: 306 - DNA, 10 bp, synthetic construct
  source 1..10: mol_type = other DNA
catcgctatt

SEQ ID NO: 307 - DNA, 10 bp, synthetic construct
  source 1..10: mol_type = other DNA
agtacttcat

SEQ ID NO: 308 - DNA, 10 bp, synthetic construct
  source 1..10: mol_type = other DNA
actcgcggaa

SEQ ID NO: 309 - DNA, 10 bp, synthetic construct
  source 1..10: mol_type = other DNA
ggccgtatga

SEQ ID NO: 310 - DNA, 10 bp, synthetic construct
  source 1..10: mol_type = other DNA
tccgtcgcct

SEQ ID NO: 311 - DNA, 10 bp, synthetic construct
  source 1..10: mol_type = other DNA
gctcggtact

SEQ ID NO: 312 - DNA, 10 bp, synthetic construct
  source 1..10: mol_type = other DNA
gcctgttatc

SEQ ID NO: 313 - DNA, 10 bp, synthetic construct
  source 1..10: mol_type = other DNA
actgtactac

SEQ ID NO: 314 - DNA, 10 bp, synthetic construct
  source 1..10: mol_type = other DNA
atctcagaat

SEQ ID NO: 315 - DNA, 10 bp, synthetic construct
  source 1..10: mol_type = other DNA
ctcctactag

SEQ ID NO: 316 - DNA, 10 bp, synthetic construct
  source 1..10: mol_type = other DNA
ggaagcagca

SEQ ID NO: 317 - DNA, 10 bp, synthetic construct
  source 1..10: mol_type = other DNA
ggcatgtgga

SEQ ID NO: 318 - DNA, 10 bp, synthetic construct
  source 1..10: mol_type = other DNA
agcgatccga

SEQ ID NO: 319 - DNA, 10 bp, synthetic construct
  source 1..10: mol_type = other DNA
gccactacaa

SEQ ID NO: 320 - DNA, 10 bp, synthetic construct
  source 1..10: mol_type = other DNA
aaccgtgcct

SEQ ID NO: 321 - DNA, 10 bp, synthetic construct
  source 1..10: mol_type = other DNA
catcacggat

SEQ ID NO: 322 - DNA, 10 bp, synthetic construct
  source 1..10: mol_type = other DNA
gtcgattggt

SEQ ID NO: 323 - DNA, 10 bp, synthetic construct
  source 1..10: mol_type = other DNA
gtcaatgtcc

SEQ ID NO: 324 - DNA, 10 bp, synthetic construct
  source 1..10: mol_type = other DNA
atatccgccg

SEQ ID NO: 325 - DNA, 10 bp, synthetic construct
  source 1..10: mol_type = other DNA
ttaatacaag

SEQ ID NO: 326 - DNA, 10 bp, synthetic construct
  source 1..10: mol_type = other DNA
ctctgatctt

SEQ ID NO: 327 - DNA, 10 bp, synthetic construct
  source 1..10: mol_type = other DNA
agcctggaac

SEQ ID NO: 328 - DNA, 10 bp, synthetic construct
  source 1..10: mol_type = other DNA
gaagcctcgg

SEQ ID NO: 329 - DNA, 10 bp, synthetic construct
  source 1..10: mol_type = other DNA
tggtcgcgct

SEQ ID NO: 330 - DNA, 10 bp, synthetic construct
  source 1..10: mol_type = other DNA
gttaattctt

SEQ ID NO: 331 - DNA, 10 bp, synthetic construct
  source 1..10: mol_type = other DNA
gatctacgcg

SEQ ID NO: 332 - DNA, 10 bp, synthetic construct
  source 1..10: mol_type = other DNA
gcaactgaat

SEQ ID NO: 333 - DNA, 10 bp, synthetic construct
  source 1..10: mol_type = other DNA
gccagcttga

SEQ ID NO: 334 - DNA, 10 bp, synthetic construct
  source 1..10: mol_type = other DNA
tgtgcatgct

SEQ ID NO: 335 - DNA, 10 bp, synthetic construct
  source 1..10: mol_type = other DNA
caggtgatct

SEQ ID NO: 336 - DNA, 10 bp, synthetic construct
  source 1..10: mol_type = other DNA
acgcctctta

SEQ ID NO: 337 - DNA, 10 bp, synthetic construct
  source 1..10: mol_type = other DNA
aatcagctgc

SEQ ID NO: 338 - DNA, 10 bp, synthetic construct
  source 1..10: mol_type = other DNA
agacacctct

SEQ ID NO: 339 - DNA, 10 bp, synthetic construct
  source 1..10: mol_type = other DNA
ggtcctgtca

SEQ ID NO: 340 - DNA, 10 bp, synthetic construct
  source 1..10: mol_type = other DNA
gtaactgcga

SEQ ID NO: 341 - DNA, 10 bp, synthetic construct
  source 1..10: mol_type = other DNA
tccgcgttct

SEQ ID NO: 342 - DNA, 10 bp, synthetic construct
  source 1..10: mol_type = other DNA
tctcatggcc

SEQ ID NO: 343 - DNA, 10 bp, synthetic construct
  source 1..10: mol_type = other DNA
tcgcggctgg

SEQ ID NO: 344 - DNA, 10 bp, synthetic construct
  source 1..10: mol_type = other DNA
aagttcatac

SEQ ID NO: 345 - DNA, 10 bp, synthetic construct
  source 1..10: mol_type = other DNA
tcctagtcga

SEQ ID NO: 346 - DNA, 10 bp, synthetic construct
  source 1..10: mol_type = other DNA
aatattgcca

SEQ ID NO: 347 - DNA, 10 bp, synthetic construct
  source 1..10: mol_type = other DNA
catggctgca

SEQ ID NO: 348 - DNA, 10 bp, synthetic construct
  source 1..10: mol_type = other DNA
atcctgatta

SEQ ID NO: 349 - DNA, 10 bp, synthetic construct
  source 1..10: mol_type = other DNA
gtgtaaccgg

SEQ ID NO: 350 - DNA, 10 bp, synthetic construct
  source 1..10: mol_type = other DNA
gcctagcggt

SEQ ID NO: 351 - DNA, 10 bp, synthetic construct
  source 1..10: mol_type = other DNA
tgtggataac

SEQ ID NO: 352 - DNA, 10 bp, synthetic construct
  source 1..10: mol_type = other DNA
gtgactattc

SEQ ID NO: 353 - DNA, 10 bp, synthetic construct
  source 1..10: mol_type = other DNA
agcactctcg

SEQ ID NO: 354 - DNA, 10 bp, synthetic construct
  source 1..10: mol_type = other DNA
agctgaacac

SEQ ID NO: 355 - DNA, 10 bp, synthetic construct
  source 1..10: mol_type = other DNA
tcttaccaga

SEQ ID NO: 356 - DNA, 10 bp, synthetic construct
  source 1..10: mol_type = other DNA
tctaatcctg

SEQ ID NO: 357 - DNA, 10 bp, synthetic construct
  source 1..10: mol_type = other DNA
gaagtattcc

SEQ ID NO: 358 - DNA, 10 bp, synthetic construct
  source 1..10: mol_type = other DNA
cagctacact

SEQ ID NO: 359 - DNA, 10 bp, synthetic construct
  source 1..10: mol_type = other DNA
cgtaagcatt

SEQ ID NO: 360 - DNA, 10 bp, synthetic construct
  source 1..10: mol_type = other DNA
tcactatacg

SEQ ID NO: 361 - DNA, 10 bp, synthetic construct
  source 1..10: mol_type = other DNA
aaggtattcg

SEQ ID NO: 362 - DNA, 10 bp, synthetic construct
  source 1..10: mol_type = other DNA
gttgatacct

SEQ ID NO: 363 - DNA, 10 bp, synthetic construct
  source 1..10: mol_type = other DNA
actgttctga

SEQ ID NO: 364 - DNA, 10 bp, synthetic construct
  source 1..10: mol_type = other DNA
gtagacatgc

SEQ ID NO: 365 - DNA, 10 bp, synthetic construct
  source 1..10: mol_type = other DNA
tcgaccgtag

SEQ ID NO: 366 - DNA, 10 bp, synthetic construct
  source 1..10: mol_type = other DNA
agagtaagtc

SEQ ID NO: 367 - DNA, 10 bp, synthetic construct
  source 1..10: mol_type = other DNA
ttcaagtctc

SEQ ID NO: 368 - DNA, 10 bp, synthetic construct
  source 1..10: mol_type = other DNA
agacgctgtg

SEQ ID NO: 369 - DNA, 10 bp, synthetic construct
  source 1..10: mol_type = other DNA
gcagcacgag

SEQ ID NO: 370 - DNA, 10 bp, synthetic construct
  source 1..10: mol_type = other DNA
cattatgcct

SEQ ID NO: 371 - DNA, 10 bp, synthetic construct
  source 1..10: mol_type = other DNA
gccacatcac

SEQ ID NO: 372 - DNA, 10 bp, synthetic construct
  source 1..10: mol_type = other DNA
agttccggac

SEQ ID NO: 373 - DNA, 10 bp, synthetic construct
  source 1..10: mol_type = other DNA
ctctgtagtc

SEQ ID NO: 374 - DNA, 10 bp, synthetic construct
  source 1..10: mol_type = other DNA
gtcctcctac

SEQ ID NO: 375 - DNA, 10 bp, synthetic construct
  source 1..10: mol_type = other DNA
tcgacaggtg

SEQ ID NO: 376 - DNA, 10 bp, synthetic construct
  source 1..10: mol_type = other DNA
gcttcagcgc

SEQ ID NO: 377 - DNA, 10 bp, synthetic construct
  source 1..10: mol_type = other DNA
attgcggcgg

SEQ ID NO: 378 - DNA, 10 bp, synthetic construct
  source 1..10: mol_type = other DNA
tcacactagt

SEQ ID NO: 379 - DNA, 10 bp, synthetic construct
  source 1..10: mol_type = other DNA
gctggatgca

SEQ ID NO: 380 - DNA, 10 bp, synthetic construct
  source 1..10: mol_type = other DNA
tgtatgtgag

SEQ ID NO: 381 - DNA, 10 bp, synthetic construct
  source 1..10: mol_type = other DNA
cgttccaacc

SEQ ID NO: 382 - DNA, 10 bp, synthetic construct
  source 1..10: mol_type = other DNA
gcgcttagat

SEQ ID NO: 383 - DNA, 10 bp, synthetic construct
  source 1..10: mol_type = other DNA
aatcggttgg

SEQ ID NO: 384 - DNA, 10 bp, synthetic construct
  source 1..10: mol_type = other DNA
ttccaaggat

SEQ ID NO: 385 - DNA, 10 bp, synthetic construct
  source 1..10: mol_type = other DNA
agccgaagcg

SEQ ID NO: 386 - DNA, 10 bp, synthetic construct
  source 1..10: mol_type = other DNA
gtgcatcacc

SEQ ID NO: 387 - DNA, 10 bp, synthetic construct
  source 1..10: mol_type = other DNA
cgtccggcct

SEQ ID NO: 388 - DNA, 10 bp, synthetic construct
  source 1..10: mol_type = other DNA
gatatctagt

SEQ ID NO: 389 - DNA, 10 bp, synthetic construct
  source 1..10: mol_type = other DNA
tgagcggaca

SEQ ID NO: 390 - DNA, 10 bp, synthetic construct
  source 1..10: mol_type = other DNA
ctgttagcga

SEQ ID NO: 391 - DNA, 10 bp, synthetic construct
  source 1..10: mol_type = other DNA
ccagacagtc

SEQ ID NO: 392 - DNA, 10 bp, synthetic construct
  source 1..10: mol_type = other DNA
cgtagattca

SEQ ID NO: 393 - DNA, 10 bp, synthetic construct
  source 1..10: mol_type = other DNA
agctaatcga

SEQ ID NO: 394 - DNA, 10 bp, synthetic construct
  source 1..10: mol_type = other DNA
ttctcgtcct

SEQ ID NO: 395 - DNA, 10 bp, synthetic construct
  source 1..10: mol_type = other DNA
tgtactagtt

SEQ ID NO: 396 - DNA, 10 bp, synthetic construct
  source 1..10: mol_type = other DNA
gacttactgt

SEQ ID NO: 397 - DNA, 10 bp, synthetic construct
  source 1..10: mol_type = other DNA
gatagatatc

SEQ ID NO: 398 - DNA, 10 bp, synthetic construct
  source 1..10: mol_type = other DNA
actgatatcc

SEQ ID NO: 399 - DNA, 10 bp, synthetic construct
  source 1..10: mol_type = other DNA
gcgaatctaa

SEQ ID NO: 400 - DNA, 10 bp, synthetic construct
  source 1..10: mol_type = other DNA
ctctcaagtg

SEQ ID NO: 401 - DNA, 10 bp, synthetic construct
  source 1..10: mol_type = other DNA
ggctcttcgc

SEQ ID NO: 402 - DNA, 10 bp, synthetic construct
  source 1..10: mol_type = other DNA
acgtcgatcc

SEQ ID NO: 403 - DNA, 10 bp, synthetic construct
  source 1..10: mol_type = other DNA
aattaagaat

SEQ ID NO: 404 - DNA, 10 bp, synthetic construct
  source 1..10: mol_type = other DNA
agcgctcgat

SEQ ID NO: 405 - DNA, 10 bp, synthetic construct
  source 1..10: mol_type = other DNA
gttaggaacc

SEQ ID NO: 406 - DNA, 10 bp, synthetic construct
  source 1..10: mol_type = other DNA
catgtcgaac

SEQ ID NO: 407 - DNA, 10 bp, synthetic construct
  source 1..10: mol_type = other DNA
gttcatacag

SEQ ID NO: 408 - DNA, 10 bp, synthetic construct
  source 1..10: mol_type = other DNA
aacgccggca

SEQ ID NO: 409 - DNA, 10 bp, synthetic construct
  source 1..10: mol_type = other DNA
tgtagagtcg

SEQ ID NO: 410 - DNA, 10 bp, synthetic construct
  source 1..10: mol_type = other DNA
tgcgaccacg

SEQ ID NO: 411 - DNA, 10 bp, synthetic construct
  source 1..10: mol_type = other DNA
tcctctctat

SEQ ID NO: 412 - DNA, 10 bp, synthetic construct
  source 1..10: mol_type = other DNA
gtaatccgta

SEQ ID NO: 413 - DNA, 10 bp, synthetic construct
  source 1..10: mol_type = other DNA
gctgagcgaa

SEQ ID NO: 414 - DNA, 10 bp, synthetic construct
  source 1..10: mol_type = other DNA
gtgttccagc

SEQ ID NO: 415 - DNA, 10 bp, synthetic construct
  source 1..10: mol_type = other DNA
gagaagacga

SEQ ID NO: 416 - DNA, 10 bp, synthetic construct
  source 1..10: mol_type = other DNA
gccggactgg

SEQ ID NO: 417 - DNA, 10 bp, synthetic construct
  source 1..10: mol_type = other DNA
tcgttccatc

SEQ ID NO: 418 - DNA, 10 bp, synthetic construct
  source 1..10: mol_type = other DNA
gcacagatgt

SEQ ID NO: 419 - DNA, 10 bp, synthetic construct
  source 1..10: mol_type = other DNA
cgcgatcaat

SEQ ID NO: 420 - DNA, 10 bp, synthetic construct
  source 1..10: mol_type = other DNA
gttggcgccg

SEQ ID NO: 421 - DNA, 10 bp, synthetic construct
  source 1..10: mol_type = other DNA
atctcatcac

SEQ ID NO: 422 - DNA, 10 bp, synthetic construct
  source 1..10: mol_type = other DNA
agtatgatct

SEQ ID NO: 423 - DNA, 10 bp, synthetic construct
  source 1..10: mol_type = other DNA
gtaccaccat

SEQ ID NO: 424 - DNA, 10 bp, synthetic construct
  source 1..10: mol_type = other DNA
ctataactgg

SEQ ID NO: 425 - DNA, 10 bp, synthetic construct
  source 1..10: mol_type = other DNA
taatctcatc

SEQ ID NO: 426 - DNA, 10 bp, synthetic construct
  source 1..10: mol_type = other DNA
tactccggcg

SEQ ID NO: 427 - DNA, 10 bp, synthetic construct
  source 1..10: mol_type = other DNA
cgctcgattc

SEQ ID NO: 428 - DNA, 10 bp, synthetic construct
  source 1..10: mol_type = other DNA
gttgccagca

SEQ ID NO: 429 - DNA, 10 bp, synthetic construct
  source 1..10: mol_type = other DNA
ggtaggccat

SEQ ID NO: 430 - DNA, 10 bp, synthetic construct
  source 1..10: mol_type = other DNA
acgacgtcag

SEQ ID NO: 431 - DNA, 10 bp, synthetic construct
  source 1..10: mol_type = other DNA
cgtccacacg

SEQ ID NO: 432 - DNA, 10 bp, synthetic construct
  source 1..10: mol_type = other DNA
aagtgctggc

SEQ ID NO: 433 - DNA, 10 bp, synthetic construct
  source 1..10: mol_type = other DNA
cagctaagga

SEQ ID NO: 434 - DNA, 10 bp, synthetic construct
  source 1..10: mol_type = other DNA
gttaactcag

SEQ ID NO: 435 - DNA, 10 bp, synthetic construct
  source 1..10: mol_type = other DNA
acaagtgtac

SEQ ID NO: 436 - DNA, 10 bp, synthetic construct
  source 1..10: mol_type = other DNA
gcacgcgatg

SEQ ID NO: 437 - DNA, 10 bp, synthetic construct
  source 1..10: mol_type = other DNA
tctcatccgt

SEQ ID NO: 438 - DNA, 10 bp, synthetic construct
  source 1..10: mol_type = other DNA
gcggtggtgg

SEQ ID NO: 439 - DNA, 10 bp, synthetic construct
  source 1..10: mol_type = other DNA
ttagctagag

SEQ ID NO: 440 - DNA, 10 bp, synthetic construct
  source 1..10: mol_type = other DNA
tagtaaggtg

SEQ ID NO: 441 - DNA, 10 bp, synthetic construct
  source 1..10: mol_type = other DNA
tatcttagtg

SEQ ID NO: 442 - DNA, 10 bp, synthetic construct
  source 1..10: mol_type = other DNA
cgtagctccg

SEQ ID NO: 443 - DNA, 10 bp, synthetic construct
  source 1..10: mol_type = other DNA
atcggtagcc

SEQ ID NO: 444 - DNA, 10 bp, synthetic construct
  source 1..10: mol_type = other DNA
gcggcagaag

SEQ ID NO: 445 - DNA, 10 bp, synthetic construct
  source 1..10: mol_type = other DNA
ggcgttgaag

SEQ ID NO: 446 - DNA, 10 bp, synthetic construct
  source 1..10: mol_type = other DNA
ttacagctat

SEQ ID NO: 447 - DNA, 10 bp, synthetic construct
  source 1..10: mol_type = other DNA
tcgttggtcc

SEQ ID NO: 448 - DNA, 10 bp, synthetic construct
  source 1..10: mol_type = other DNA
gaatgttgaa

SEQ ID NO: 449 - DNA, 10 bp, synthetic construct
  source 1..10: mol_type = other DNA
cgctaccact

SEQ ID NO: 450 - DNA, 10 bp, synthetic construct
  source 1..10: mol_type = other DNA
tcgtccagca

SEQ ID NO: 451 - DNA, 10 bp, synthetic construct
  source 1..10: mol_type = other DNA
gagtacagcc

SEQ ID NO: 452 - DNA, 10 bp, synthetic construct
  source 1..10: mol_type = other DNA
gagttagaat

SEQ ID NO: 453 - DNA, 10 bp, synthetic construct
  source 1..10: mol_type = other DNA
cagtgtgaga

SEQ ID NO: 454 - DNA, 10 bp, synthetic construct
  source 1..10: mol_type = other DNA
agagttctgg

SEQ ID NO: 455 - DNA, 10 bp, synthetic construct
  source 1..10: mol_type = other DNA
gcacctatgg

SEQ ID NO: 456 - DNA, 10 bp, synthetic construct
  source 1..10: mol_type = other DNA
ttgcgttctc

SEQ ID NO: 457 - DNA, 10 bp, synthetic construct
  source 1..10: mol_type = other DNA
tgtacagaag

SEQ ID NO: 458 - DNA, 10 bp, synthetic construct
  source 1..10: mol_type = other DNA
ggcgtcattc

SEQ ID NO: 459 - DNA, 10 bp, synthetic construct
  source 1..10: mol_type = other DNA
catatcaggt

SEQ ID NO: 460 - DNA, 10 bp, synthetic construct
  source 1..10: mol_type = other DNA
gtatgtccgc

SEQ ID NO: 461 - DNA, 10 bp, synthetic construct
  source 1..10: mol_type = other DNA
tgcggctacc

SEQ ID NO: 462 - DNA, 10 bp, synthetic construct
  source 1..10: mol_type = other DNA
ggcctgcgac

SEQ ID NO: 463 - DNA, 10 bp, synthetic construct
  source 1..10: mol_type = other DNA
agctcctgca

SEQ ID NO: 464 - DNA, 10 bp, synthetic construct
  source 1..10: mol_type = other DNA
gcggtactgc

SEQ ID NO: 465 - DNA, 10 bp, synthetic construct
  source 1..10: mol_type = other DNA
cgcgaatgcc

SEQ ID NO: 466 - DNA, 10 bp, synthetic construct
  source 1..10: mol_type = other DNA
cctacagcgg

SEQ ID NO: 467 - DNA, 10 bp, synthetic construct
  source 1..10: mol_type = other DNA
tatcctaatt

SEQ ID NO: 468 - DNA, 10 bp, synthetic construct
  source 1..10: mol_type = other DNA
gacactattg

SEQ ID NO: 469 - DNA, 10 bp, synthetic construct
  source 1..10: mol_type = other DNA
tctatatgac

SEQ ID NO: 470 - DNA, 10 bp, synthetic construct
  source 1..10: mol_type = other DNA
gttgtgcagt

SEQ ID NO: 471 - DNA, 10 bp, synthetic construct
  source 1..10: mol_type = other DNA
ttaggcaact

SEQ ID NO: 472 - DNA, 10 bp, synthetic construct
  source 1..10: mol_type = other DNA
gcttacgcgg

SEQ ID NO: 473 - DNA, 10 bp, synthetic construct
  source 1..10: mol_type = other DNA
gctagtctca

SEQ ID NO: 474 - DNA, 10 bp, synthetic construct
  source 1..10: mol_type = other DNA
gtcggtgatg

SEQ ID NO: 475 - DNA, 10 bp, synthetic construct
  source 1..10: mol_type = other DNA
gaggaacctt

SEQ ID NO: 476 - DNA, 10 bp, synthetic construct
  source 1..10: mol_type = other DNA
agcggaataa

SEQ ID NO: 477 - DNA, 10 bp, synthetic construct
  source 1..10: mol_type = other DNA
ctaatgatac

SEQ ID NO: 478 - DNA, 10 bp, synthetic construct
  source 1..10: mol_type = other DNA
tagcggcgct

SEQ ID NO: 479 - DNA, 10 bp, synthetic construct
  source 1..10: mol_type = other DNA
gcggtcttga

SEQ ID NO: 480 - DNA, 10 bp, synthetic construct
  source 1..10: mol_type = other DNA
cgcgctgagt

SEQ ID NO: 481 - DNA, 10 bp, synthetic construct
  source 1..10: mol_type = other DNA
cacggacagg

SEQ ID NO: 482 - DNA, 10 bp, synthetic construct
  source 1..10: mol_type = other DNA
gtgcgtacta

SEQ ID NO: 483 - DNA, 10 bp, synthetic construct
  source 1..10: mol_type = other DNA
tagtgtgcgg

SEQ ID NO: 484 - DNA, 10 bp, synthetic construct
  source 1..10: mol_type = other DNA
cgatcttaga

SEQ ID NO: 485 - DNA, 10 bp, synthetic construct
  source 1..10: mol_type = other DNA
gacggtcagt

SEQ ID NO: 486 - DNA, 10 bp, synthetic construct
  source 1..10: mol_type = other DNA
tgccggccat

SEQ ID NO: 487 - DNA, 10 bp, synthetic construct
  source 1..10: mol_type = other DNA
gttgtcagtg

SEQ ID NO: 488 - DNA, 10 bp, synthetic construct
  source 1..10: mol_type = other DNA
gtaccttgag

SEQ ID NO: 489 - DNA, 10 bp, synthetic construct
  source 1..10: mol_type = other DNA
gtattgctct

SEQ ID NO: 490 - DNA, 10 bp, synthetic construct
  source 1..10: mol_type = other DNA
taacgttgct

SEQ ID NO: 491 - DNA, 10 bp, synthetic construct
  source 1..10: mol_type = other DNA
ctccgcatga

SEQ ID NO: 492 - DNA, 10 bp, synthetic construct
  source 1..10: mol_type = other DNA
aatactgcgt

SEQ ID NO: 493 - DNA, 10 bp, synthetic construct
  source 1..10: mol_type = other DNA
ttgcttatgc

SEQ ID NO: 494 - DNA, 10 bp, synthetic construct
  source 1..10: mol_type = other DNA
cacctctcgg

SEQ ID NO: 495 - DNA, 10 bp, synthetic construct
  source 1..10: mol_type = other DNA
cttgctcagt

SEQ ID NO: 496 - DNA, 10 bp, synthetic construct
  source 1..10: mol_type = other DNA
atcaggtgaa

SEQ ID NO: 497 - DNA, 10 bp, synthetic construct
  source 1..10: mol_type = other DNA
gtacttacgt

SEQ ID NO: 498 - DNA, 10 bp, synthetic construct
  source 1..10: mol_type = other DNA
gtcgccggtg

SEQ ID NO: 499 - DNA, 10 bp, synthetic construct
  source 1..10: mol_type = other DNA
aatagattat

SEQ ID NO: 500 - DNA, 10 bp, synthetic construct
  source 1..10: mol_type = other DNA
aagagtaccg

SEQ ID NO: 501 - DNA, 10 bp, synthetic construct
  source 1..10: mol_type = other DNA
gagataccgt

SEQ ID NO: 502 - DNA, 10 bp, synthetic construct
  source 1..10: mol_type = other DNA
ctgatgtaac

SEQ ID NO: 503 - DNA, 10 bp, synthetic construct
  source 1..10: mol_type = other DNA
cagagttcga

SEQ ID NO: 504 - DNA, 10 bp, synthetic construct
  source 1..10: mol_type = other DNA
gatgacatat

SEQ ID NO: 505 - DNA, 10 bp, synthetic construct
  source 1..10: mol_type = other DNA
tgtccgtagg

SEQ ID NO: 506 - DNA, 10 bp, synthetic construct
  source 1..10: mol_type = other DNA
cacgtctaat

SEQ ID NO: 507 - DNA, 10 bp, synthetic construct
  source 1..10: mol_type = other DNA
agccgtggtc

SEQ ID NO: 508 - DNA, 10 bp, synthetic construct
  source 1..10: mol_type = other DNA
tgtggtctca

SEQ ID NO: 509 - DNA, 10 bp, synthetic construct
  source 1..10: mol_type = other DNA
gaatccggaa

SEQ ID NO: 510 - DNA, 10 bp, synthetic construct
  source 1..10: mol_type = other DNA
tgtcggacca

SEQ ID NO: 511 - DNA, 10 bp, synthetic construct
  source 1..10: mol_type = other DNA
aggtctgccg

SEQ ID NO: 512 - DNA, 10 bp, synthetic construct
  source 1..10: mol_type = other DNA
ctagcggtgg

SEQ ID NO: 513 - DNA, 10 bp, synthetic construct
  source 1..10: mol_type = other DNA
acgttagtca

SEQ ID NO: 514 - DNA, 10 bp, synthetic construct
  source 1..10: mol_type = other DNA
gaatattggt

SEQ ID NO: 515 - DNA, 10 bp, synthetic construct
  source 1..10: mol_type = other DNA
gtaaggcaac

SEQ ID NO: 516 - DNA, 10 bp, synthetic construct
  source 1..10: mol_type = other DNA
gactgcgaca

SEQ ID NO: 517 - DNA, 10 bp, synthetic construct
  source 1..10: mol_type = other DNA
ttatgaacat

SEQ ID NO: 518 - DNA, 10 bp, synthetic construct
  source 1..10: mol_type = other DNA
aacgtcatat

SEQ ID NO: 519 - DNA, 10 bp, synthetic construct
  source 1..10: mol_type = other DNA
ggcgttcgct

SEQ ID NO: 520 - DNA, 10 bp, synthetic construct
  source 1..10: mol_type = other DNA
tagtgtacat

SEQ ID NO: 521 - DNA, 10 bp, synthetic construct
  source 1..10: mol_type = other DNA
ggatcggcag

SEQ ID NO: 522 - DNA, 10 bp, synthetic construct
  source 1..10: mol_type = other DNA
gtccggcttg

SEQ ID NO: 523 - DNA, 10 bp, synthetic construct
  source 1..10: mol_type = other DNA
accgtgcggc

SEQ ID NO: 524 - DNA, 10 bp, synthetic construct
  source 1..10: mol_type = other DNA
tgactggcgt

SEQ ID NO: 525 - DNA, 10 bp, synthetic construct
  source 1..10: mol_type = other DNA
tatcgcgcac

SEQ ID NO: 526 - DNA, 10 bp, synthetic construct
  source 1..10: mol_type = other DNA
tcgaacgagt

SEQ ID NO: 527 - DNA, 10 bp, synthetic construct
  source 1..10: mol_type = other DNA
aaggagcaat

SEQ ID NO: 528 - DNA, 10 bp, synthetic construct
  source 1..10: mol_type = other DNA
gatcgttcta

SEQ ID NO: 529 - DNA, 10 bp, synthetic construct
  source 1..10: mol_type = other DNA
atacctctgg

SEQ ID NO: 530 - DNA, 10 bp, synthetic construct
  source 1..10: mol_type = other DNA
gtgcgccgta

SEQ ID NO: 531 - DNA, 10 bp, synthetic construct
  source 1..10: mol_type = other DNA
cgtattagcc

SEQ ID NO: 532 - DNA, 10 bp, synthetic construct
  source 1..10: mol_type = other DNA
tgcgctcgta

SEQ ID NO: 533 - DNA, 10 bp, synthetic construct
  source 1..10: mol_type = other DNA
actagttgaa

SEQ ID NO: 534 - DNA, 10 bp, synthetic construct
  source 1..10: mol_type = other DNA
gtggctctgt

SEQ ID NO: 535 - DNA, 10 bp, synthetic construct
  source 1..10: mol_type = other DNA
gccaacggat

SEQ ID NO: 536 - DNA, 10 bp, synthetic construct
  source 1..10: mol_type = other DNA
ggcaacttat

SEQ ID NO: 537 - DNA, 10 bp, synthetic construct
  source 1..10: mol_type = other DNA
cattaatctc

SEQ ID NO: 538 - DNA, 10 bp, synthetic construct
  source 1..10: mol_type = other DNA
cgcgacacta

SEQ ID NO: 539 - DNA, 10 bp, synthetic construct
  source 1..10: mol_type = other DNA
gaggaatcgc

SEQ ID NO: 540 - DNA, 10 bp, synthetic construct
  source 1..10: mol_type = other DNA
aggtgtgatc

SEQ ID NO: 541 - DNA, 10 bp, synthetic construct
  source 1..10: mol_type = other DNA
aactcggacg

SEQ ID NO: 542 - DNA, 10 bp, synthetic construct
  source 1..10: mol_type = other DNA
ttcatggcgt

SEQ ID NO: 543 - DNA, 10 bp, synthetic construct
  source 1..10: mol_type = other DNA
tcactcgttg

SEQ ID NO: 544 - DNA, 10 bp, synthetic construct
  source 1..10: mol_type = other DNA
tggactccgt

SEQ ID NO: 545 - DNA, 10 bp, synthetic construct
  source 1..10: mol_type = other DNA
ctcggtgccg

SEQ ID NO: 546 - DNA, 10 bp, synthetic construct
  source 1..10: mol_type = other DNA
cctgcagcaa

SEQ ID NO: 547 - DNA, 10 bp, synthetic construct
  source 1..10: mol_type = other DNA
aagtcgtaag

SEQ ID NO: 548 - DNA, 10 bp, synthetic construct
  source 1..10: mol_type = other DNA
gatgctagat

SEQ ID NO: 549 - DNA, 10 bp, synthetic construct
  source 1..10: mol_type = other DNA
gtactgagtt

SEQ ID NO: 550 - DNA, 10 bp, synthetic construct
  source 1..10: mol_type = other DNA
ctccggtcct

SEQ ID NO: 551 - DNA, 10 bp, synthetic construct
  source 1..10: mol_type = other DNA
ttcacggatg

SEQ ID NO: 552 - DNA, 10 bp, synthetic construct
  source 1..10: mol_type = other DNA
cgtagtggat

SEQ ID NO: 553 - DNA, 10 bp, synthetic construct
  source 1..10: mol_type = other DNA
gcgtcagtat

SEQ ID NO: 554 - DNA, 10 bp, synthetic construct
  source 1..10: mol_type = other DNA
tgagtgttct

SEQ ID NO: 555 - DNA, 10 bp, synthetic construct
  source 1..10: mol_type = other DNA
gtcgcttcta

SEQ ID NO: 556 - DNA, 10 bp, synthetic construct
  source 1..10: mol_type = other DNA
tctattgatg

SEQ ID NO: 557 - DNA, 10 bp, synthetic construct
  source 1..10: mol_type = other DNA
ggtgtagtta

SEQ ID NO: 558 - DNA, 10 bp, synthetic construct
  source 1..10: mol_type = other DNA
taaggactgg

SEQ ID NO: 559 - DNA, 10 bp, synthetic construct
  source 1..10: mol_type = other DNA
gtccaccgga

SEQ ID NO: 560 - DNA, 10 bp, synthetic construct
  source 1..10: mol_type = other DNA
acgcgttacc

SEQ ID NO: 561 - DNA, 10 bp, synthetic construct
  source 1..10: mol_type = other DNA
caggacgtac

SEQ ID NO: 562 - DNA, 10 bp, synthetic construct
  source 1..10: mol_type = other DNA
aggtgacctg

SEQ ID NO: 563 - DNA, 10 bp, synthetic construct
  source 1..10: mol_type = other DNA
gttactcata

SEQ ID NO: 564 - DNA, 10 bp, synthetic construct
  source 1..10: mol_type = other DNA
cacgcggtta

SEQ ID NO: 565 - DNA, 10 bp, synthetic construct
  source 1..10: mol_type = other DNA
gactatgctg

SEQ ID NO: 566 - DNA, 10 bp, synthetic construct
  source 1..10: mol_type = other DNA
gaagagtgct

SEQ ID NO: 567 - DNA, 10 bp, synthetic construct
  source 1..10: mol_type = other DNA
tgtccgtcta

SEQ ID NO: 568 - DNA, 10 bp, synthetic construct
  source 1..10: mol_type = other DNA
tgttgatggc

SEQ ID NO: 569 - DNA, 10 bp, synthetic construct
  source 1..10: mol_type = other DNA
accatggacg

SEQ ID NO: 570 - DNA, 10 bp, synthetic construct
  source 1..10: mol_type = other DNA
gcacaggcga

SEQ ID NO: 571 - DNA, 10 bp, synthetic construct
  source 1..10: mol_type = other DNA
tgatcaggtt

SEQ ID NO: 572 - DNA, 10 bp, synthetic construct
  source 1..10: mol_type = other DNA
gagaggtccg

SEQ ID NO: 573 - DNA, 10 bp, synthetic construct
  source 1..10: mol_type = other DNA
aggccacgat

SEQ ID NO: 574 - DNA, 10 bp, synthetic construct
  source 1..10: mol_type = other DNA
ccttggtgca

SEQ ID NO: 575 - DNA, 10 bp, synthetic construct
  source 1..10: mol_type = other DNA
ccttatgatc

SEQ ID NO: 576 - DNA, 10 bp, synthetic construct
  source 1..10: mol_type = other DNA
gcgtctaacc

SEQ ID NO: 577 - DNA, 10 bp, synthetic construct
  source 1..10: mol_type = other DNA
ctagacgatg

SEQ ID NO: 578 - DNA, 10 bp, synthetic construct
  source 1..10: mol_type = other DNA
cctgcgcgga

SEQ ID NO: 579 - DNA, 10 bp, synthetic construct
  source 1..10: mol_type = other DNA
aggcgctgaa

SEQ ID NO: 580 - DNA, 10 bp, synthetic construct
  source 1..10: mol_type = other DNA
cgttccgtta

SEQ ID NO: 581 - DNA, 10 bp, synthetic construct
  source 1..10: mol_type = other DNA
atcgaagtat

SEQ ID NO: 582 - DNA, 10 bp, synthetic construct
  source 1..10: mol_type = other DNA
ataccaatac

SEQ ID NO: 583 - DNA, 10 bp, synthetic construct
  source 1..10: mol_type = other DNA
gagtgcatcg

SEQ ID NO: 584 - DNA, 10 bp, synthetic construct
  source 1..10: mol_type = other DNA
gctgactccg

SEQ ID NO: 585 - DNA, 10 bp, synthetic construct
  source 1..10: mol_type = other DNA
gttgcgtctt

SEQ ID NO: 586 - DNA, 10 bp, synthetic construct
  source 1..10: mol_type = other DNA
tatggcctcc

SEQ ID NO: 587 - DNA, 10 bp, synthetic construct
  source 1..10: mol_type = other DNA
ggtgtatggc

SEQ ID NO: 588 - DNA, 10 bp, synthetic construct
  source 1..10: mol_type = other DNA
gtcgtagcaa

SEQ ID NO: 589 - DNA, 10 bp, synthetic construct
  source 1..10: mol_type = other DNA
gaagatcctc

SEQ ID NO: 590 - DNA, 10 bp, synthetic construct
  source 1..10: mol_type = other DNA
gtcctcgcgg

SEQ ID NO: 591 - DNA, 10 bp, synthetic construct
  source 1..10: mol_type = other DNA
ttcgaactcc

SEQ ID NO: 592 - DNA, 10 bp, synthetic construct
  source 1..10: mol_type = other DNA
tatggcagcg

SEQ ID NO: 593 - DNA, 10 bp, synthetic construct
  source 1..10: mol_type = other DNA
ctcacaaggc

SEQ ID NO: 594 - DNA, 10 bp, synthetic construct
  source 1..10: mol_type = other DNA
ggacgtgcgc

SEQ ID NO: 595 - DNA, 10 bp, synthetic construct
  source 1..10: mol_type = other DNA
cactccgttg

SEQ ID NO: 596 - DNA, 10 bp, synthetic construct
  source 1..10: mol_type = other DNA
gccgtgatct

SEQ ID NO: 597 - DNA, 10 bp, synthetic construct
  source 1..10: mol_type = other DNA
aactccggat

SEQ ID NO: 598 - DNA, 10 bp, synthetic construct
  source 1..10: mol_type = other DNA
tgcggagcgg

SEQ ID NO: 599 - DNA, 10 bp, synthetic construct
  source 1..10: mol_type = other DNA
gtcggctgca

SEQ ID NO: 600 - DNA, 10 bp, synthetic construct
  source 1..10: mol_type = other DNA
caataggaga

SEQ ID NO: 601 - DNA, 10 bp, synthetic construct
  source 1..10: mol_type = other DNA
ctgtgacggt

SEQ ID NO: 602 - DNA, 10 bp, synthetic construct
  source 1..10: mol_type = other DNA
ccacgcggct

SEQ ID NO: 603 - DNA, 10 bp, synthetic construct
  source 1..10: mol_type = other DNA
tcggagagcc

SEQ ID NO: 604 - DNA, 10 bp, synthetic construct
  source 1..10: mol_type = other DNA
gaaggcacga

SEQ ID NO: 605 - DNA, 10 bp, synthetic construct
  source 1..10: mol_type = other DNA
ctctgctcgg

SEQ ID NO: 606 - DNA, 10 bp, synthetic construct
  source 1..10: mol_type = other DNA
gctccaggcc

SEQ ID NO: 607 - DNA, 10 bp, synthetic construct
  source 1..10: mol_type = other DNA
gctcgcgcct

SEQ ID NO: 608 - DNA, 10 bp, synthetic construct
  source 1..10: mol_type = other DNA
gtggagagat

SEQ ID NO: 609 - DNA, 10 bp, synthetic construct
  source 1..10: mol_type = other DNA
ctgcgcgccg

SEQ ID NO: 610 - DNA, 10 bp, synthetic construct
  source 1..10: mol_type = other DNA
agacataggt

SEQ ID NO: 611 - DNA, 10 bp, synthetic construct
  source 1..10: mol_type = other DNA
aatgagtcat

SEQ ID NO: 612 - DNA, 10 bp, synthetic construct
  source 1..10: mol_type = other DNA
ttgctatccg

SEQ ID NO: 613 - DNA, 10 bp, synthetic construct
  source 1..10: mol_type = other DNA
tcatgagctt

SEQ ID NO: 614 - DNA, 10 bp, synthetic construct
  source 1..10: mol_type = other DNA
gcgcatgact

SEQ ID NO: 615 - DNA, 10 bp, synthetic construct
  source 1..10: mol_type = other DNA
tccatatgtt

SEQ ID NO: 616 - DNA, 10 bp, synthetic construct
  source 1..10: mol_type = other DNA
cgagtccgaa

SEQ ID NO: 617 - DNA, 10 bp, synthetic construct
  source 1..10: mol_type = other DNA
ctcgagcaga

SEQ ID NO: 618 - DNA, 10 bp, synthetic construct
  source 1..10: mol_type = other DNA
gcgttagttg

SEQ ID NO: 619 - DNA, 10 bp, synthetic construct
  source 1..10: mol_type = other DNA
ataatctaga

SEQ ID NO: 620 - DNA, 10 bp, synthetic construct
  source 1..10: mol_type = other DNA
atctgtcctt

SEQ ID NO: 621 - DNA, 10 bp, synthetic construct
  source 1..10: mol_type = other DNA
gaaccgcgcg

SEQ ID NO: 622 - DNA, 10 bp, synthetic construct
  source 1..10: mol_type = other DNA
gtgattcgga

SEQ ID NO: 623 - DNA, 10 bp, synthetic construct
  source 1..10: mol_type = other DNA
gctcagagta

SEQ ID NO: 624 - DNA, 10 bp, synthetic construct
  source 1..10: mol_type = other DNA
gaagacagtt

SEQ ID NO: 625 - DNA, 10 bp, synthetic construct
  source 1..10: mol_type = other DNA
tatgtatcgc

SEQ ID NO: 626 - DNA, 10 bp, synthetic construct
  source 1..10: mol_type = other DNA
gtctgttgcc

SEQ ID NO: 627 - DNA, 10 bp, synthetic construct
  source 1..10: mol_type = other DNA
tccgtagagg

SEQ ID NO: 628 - DNA, 10 bp, synthetic construct
  source 1..10: mol_type = other DNA
tgagtacgtg

SEQ ID NO: 629 - DNA, 10 bp, synthetic construct
  source 1..10: mol_type = other DNA
tgtcctgtgt

SEQ ID NO: 630 - DNA, 10 bp, synthetic construct
  source 1..10: mol_type = other DNA
gcgacggccg

SEQ ID NO: 631 - DNA, 10 bp, synthetic construct
  source 1..10: mol_type = other DNA
tgcctgaggt

SEQ ID NO: 632 - DNA, 10 bp, synthetic construct
  source 1..10: mol_type = other DNA
tacatcctat

SEQ ID NO: 633 - DNA, 10 bp, synthetic construct
  source 1..10: mol_type = other DNA
gcgctgccgt

SEQ ID NO: 634 - DNA, 10 bp, synthetic construct
  source 1..10: mol_type = other DNA
gcttgcggcc

SEQ ID NO: 635 - DNA, 10 bp, synthetic construct
  source 1..10: mol_type = other DNA
gcttcttcat

SEQ ID NO: 636 - DNA, 10 bp, synthetic construct
  source 1..10: mol_type = other DNA
gttattaagg

SEQ ID NO: 637 - DNA, 10 bp, synthetic construct
  source 1..10: mol_type = other DNA
tcgtgagtgg

SEQ ID NO: 638 - DNA, 10 bp, synthetic construct
  source 1..10: mol_type = other DNA
ctgtaacgta

SEQ ID NO: 639 - DNA, 10 bp, synthetic construct
  source 1..10: mol_type = other DNA
cacatcacca

SEQ ID NO: 640 - DNA, 10 bp, synthetic construct
  source 1..10: mol_type = other DNA
gcagtcctag

SEQ ID NO: 641 - DNA, 10 bp, synthetic construct
  source 1..10: mol_type = other DNA
ccttggcgag

SEQ ID NO: 642 - DNA, 10 bp, synthetic construct
  source 1..10: mol_type = other DNA
cgcggtcttg

SEQ ID NO: 643 - DNA, 10 bp, synthetic construct
  source 1..10: mol_type = other DNA
ctgcgtcaag

SEQ ID NO: 644 - DNA, 10 bp, synthetic construct
  source 1..10: mol_type = other DNA
aggatacata

SEQ ID NO: 645 - DNA, 10 bp, synthetic construct
  source 1..10: mol_type = other DNA
ctgagttgtc

SEQ ID NO: 646 - DNA, 10 bp, synthetic construct
  source 1..10: mol_type = other DNA
gcggcgagtt

SEQ ID NO: 647 - DNA, 10 bp, synthetic construct
  source 1..10: mol_type = other DNA
ggtcttacct

SEQ ID NO: 648 - DNA, 10 bp, synthetic construct
  source 1..10: mol_type = other DNA
tactctcctg

SEQ ID NO: 649 - DNA, 10 bp, synthetic construct
  source 1..10: mol_type = other DNA
cgctctatga

SEQ ID NO: 650 - DNA, 10 bp, synthetic construct
  source 1..10: mol_type = other DNA
ttgaggcatt

SEQ ID NO: 651 - DNA, 10 bp, synthetic construct
  source 1..10: mol_type = other DNA
gtaggcgttc

SEQ ID NO: 652 - DNA, 10 bp, synthetic construct
  source 1..10: mol_type = other DNA
ctcgctaggt

SEQ ID NO: 653 - DNA, 10 bp, synthetic construct
  source 1..10: mol_type = other DNA
gcaggttcta

SEQ ID NO: 654 - DNA, 10 bp, synthetic construct
  source 1..10: mol_type = other DNA
ggtcgtagaa

SEQ ID NO: 655 - DNA, 10 bp, synthetic construct
  source 1..10: mol_type = other DNA
ggttgtctcc

SEQ ID NO: 656 - DNA, 10 bp, synthetic construct
  source 1..10: mol_type = other DNA
cacatgtcgc

SEQ ID NO: 657 - DNA, 10 bp, synthetic construct
  source 1..10: mol_type = other DNA
gtcgtccggt

SEQ ID NO: 658 - DNA, 10 bp, synthetic construct
  source 1..10: mol_type = other DNA
gtggaagtaa

SEQ ID NO: 659 - DNA, 10 bp, synthetic construct
  source 1..10: mol_type = other DNA
gcacgtacat

SEQ ID NO: 660 - DNA, 10 bp, synthetic construct
  source 1..10: mol_type = other DNA
tcgagtatgc

SEQ ID NO: 661 - DNA, 10 bp, synthetic construct
  source 1..10: mol_type = other DNA
agctcgtagt

SEQ ID NO: 662 - DNA, 10 bp, synthetic construct
  source 1..10: mol_type = other DNA
ctccgttatc

SEQ ID NO: 663 - DNA, 10 bp, synthetic construct
  source 1..10: mol_type = other DNA
cctctacttg

SEQ ID NO: 664 - DNA, 10 bp, synthetic construct
  source 1..10: mol_type = other DNA
ggtggcgtct

SEQ ID NO: 665 - DNA, 10 bp, synthetic construct
  source 1..10: mol_type = other DNA
cgccgagtca

SEQ ID NO: 666 - DNA, 10 bp, synthetic construct
  source 1..10: mol_type = other DNA
gtctgccact

SEQ ID NO: 667 - DNA, 10 bp, synthetic construct
  source 1..10: mol_type = other DNA
gcgttcgacg

SEQ ID NO: 668 - DNA, 10 bp, synthetic construct
  source 1..10: mol_type = other DNA
cagtcttgtt

SEQ ID NO: 669 - DNA, 10 bp, synthetic construct
  source 1..10: mol_type = other DNA
ggtatctcct

SEQ ID NO: 670 - DNA, 10 bp, synthetic construct
  source 1..10: mol_type = other DNA
ctgtactcac

SEQ ID NO: 671 - DNA, 10 bp, synthetic construct
  source 1..10: mol_type = other DNA
ttacgcgtga

SEQ ID NO: 672 - DNA, 10 bp, synthetic construct
  source 1..10: mol_type = other DNA
aggttctcgt

SEQ ID NO: 673 - DNA, 10 bp, synthetic construct
  source 1..10: mol_type = other DNA
cttgcgatcc

SEQ ID NO: 674 - DNA, 10 bp, synthetic construct
  source 1..10: mol_type = other DNA
tgaatcgtgg

SEQ ID NO: 675 - DNA, 10 bp, synthetic construct
  source 1..10: mol_type = other DNA
tcgacgtgga

SEQ ID NO: 676 - DNA, 10 bp, synthetic construct
  source 1..10: mol_type = other DNA
ggcaaggtac

SEQ ID NO: 677 - DNA, 10 bp, synthetic construct
  source 1..10: mol_type = other DNA
ctcagctgcc

SEQ ID NO: 678 - DNA, 10 bp, synthetic construct
  source 1..10: mol_type = other DNA
gcctgtcaga

SEQ ID NO: 679 - DNA, 10 bp, synthetic construct
  source 1..10: mol_type = other DNA
agcgacatca

SEQ ID NO: 680 - DNA, 10 bp, synthetic construct
  source 1..10: mol_type = other DNA
gcgagaatat

SEQ ID NO: 681 - DNA, 10 bp, synthetic construct
  source 1..10: mol_type = other DNA
ggctagctca

SEQ ID NO: 682 - DNA, 10 bp, synthetic construct
  source 1..10: mol_type = other DNA
tattcggtac

SEQ ID NO: 683 - DNA, 10 bp, synthetic construct
  source 1..10: mol_type = other DNA
ttggtaggac

SEQ ID NO: 684 - DNA, 10 bp, synthetic construct
  source 1..10: mol_type = other DNA
caatcgtggt

SEQ ID NO: 685 - DNA, 10 bp, synthetic construct
  source 1..10: mol_type = other DNA
cgctggcgcg

SEQ ID NO: 686 - DNA, 10 bp, synthetic construct
  source 1..10: mol_type = other DNA
ctggtgcgtt

SEQ ID NO: 687 - DNA, 10 bp, synthetic construct
  source 1..10: mol_type = other DNA
gcgacgctag

SEQ ID NO: 688 - DNA, 10 bp, synthetic construct
  source 1..10: mol_type = other DNA
gcgctggtct

SEQ ID NO: 689 - DNA, 10 bp, synthetic construct
  source 1..10: mol_type = other DNA
tgtcttctaa

SEQ ID NO: 690 - DNA, 10 bp, synthetic construct
  source 1..10: mol_type = other DNA
tcataccggt

SEQ ID NO: 691 - DNA, 10 bp, synthetic construct
  source 1..10: mol_type = other DNA
gcttcgtggc

SEQ ID NO: 692 - DNA, 10 bp, synthetic construct
  source 1..10: mol_type = other DNA
tggagcacat

SEQ ID NO: 693 - DNA, 10 bp, synthetic construct
  source 1..10: mol_type = other DNA
ggctatcaac

SEQ ID NO: 694 - DNA, 10 bp, synthetic construct
  source 1..10: mol_type = other DNA
ttattacgta

SEQ ID NO: 695 - DNA, 10 bp, synthetic construct
  source 1..10: mol_type = other DNA
aggcagctac

SEQ ID NO: 696 - DNA, 10 bp, synthetic construct
  source 1..10: mol_type = other DNA
gctgtcggcg

SEQ ID NO: 697 - DNA, 10 bp, synthetic construct
  source 1..10: mol_type = other DNA
atactgtggc

SEQ ID NO: 698 - DNA, 10 bp, synthetic construct
  source 1..10: mol_type = other DNA
atgaagacgg

SEQ ID NO: 699 - DNA, 10 bp, synthetic construct
  source 1..10: mol_type = other DNA
atcgtcttaa

SEQ ID NO: 700 - DNA, 10 bp, synthetic construct
  source 1..10: mol_type = other DNA
aatgtctgta

SEQ ID NO: 701 - DNA, 10 bp, synthetic construct
  source 1..10: mol_type = other DNA
ggtcagcgtg

SEQ ID NO: 702 - DNA, 10 bp, synthetic construct
  source 1..10: mol_type = other DNA
ttaggtccta

SEQ ID NO: 703 - DNA, 10 bp, synthetic construct
  source 1..10: mol_type = other DNA
gaccgtgaat

SEQ ID NO: 704 - DNA, 10 bp, synthetic construct
  source 1..10: mol_type = other DNA
acttctgtcc

SEQ ID NO: 705 - DNA, 10 bp, synthetic construct
  source 1..10: mol_type = other DNA
atcggcgaac

SEQ ID NO: 706 - DNA, 10 bp, synthetic construct
  source 1..10: mol_type = other DNA
gcaagcttat

SEQ ID NO: 707 - DNA, 10 bp, synthetic construct
  source 1..10: mol_type = other DNA
tagctcaggc

SEQ ID NO: 708 - DNA, 10 bp, synthetic construct
  source 1..10: mol_type = other DNA
gctgttgctg

SEQ ID NO: 709 - DNA, 10 bp, synthetic construct
  source 1..10: mol_type = other DNA
gtgaatggag

SEQ ID NO: 710 - DNA, 10 bp, synthetic construct
  source 1..10: mol_type = other DNA
gtctaagcac

SEQ ID NO: 711 - DNA, 10 bp, synthetic construct
  source 1..10: mol_type = other DNA
atagcgcgat

SEQ ID NO: 712 - DNA, 10 bp, synthetic construct
  source 1..10: mol_type = other DNA
gctgaggata

SEQ ID NO: 713 - DNA, 10 bp, synthetic construct
  source 1..10: mol_type = other DNA
atctcctaag

SEQ ID NO: 714 - DNA, 10 bp, synthetic construct
  source 1..10: mol_type = other DNA
gtccgagcag

SEQ ID NO: 715 - DNA, 10 bp, synthetic construct
  source 1..10: mol_type = other DNA
tcgaggtgat

SEQ ID NO: 716 - DNA, 10 bp, synthetic construct
  source 1..10: mol_type = other DNA
gatacgtgcg

SEQ ID NO: 717 - DNA, 10 bp, synthetic construct
  source 1..10: mol_type = other DNA
attgtatact

SEQ ID NO: 718 - DNA, 10 bp, synthetic construct
  source 1..10: mol_type = other DNA
cgttaactga

SEQ ID NO: 719 - DNA, 10 bp, synthetic construct
  source 1..10: mol_type = other DNA
actcgtatgc

SEQ ID NO: 720 - DNA, 10 bp, synthetic construct
  source 1..10: mol_type = other DNA
gtcctgtcaa

SEQ ID NO: 721 - DNA, 10 bp, synthetic construct
  source 1..10: mol_type = other DNA
tagatcgtcc

SEQ ID NO: 722 - DNA, 10 bp, synthetic construct
  source 1..10: mol_type = other DNA
cgtccgtggt

SEQ ID NO: 723 - DNA, 10 bp, synthetic construct
  source 1..10: mol_type = other DNA
tactgtctgt

SEQ ID NO: 724 - DNA, 10 bp, synthetic construct
  source 1..10: mol_type = other DNA
gtggtacaca

SEQ ID NO: 725 - DNA, 10 bp, synthetic construct
  source 1..10: mol_type = other DNA
cgaccgacgt

SEQ ID NO: 726 - DNA, 10 bp, synthetic construct
  source 1..10: mol_type = other DNA
tcgtgcctat

SEQ ID NO: 727 - DNA, 10 bp, synthetic construct
  source 1..10: mol_type = other DNA
gcatggctag

SEQ ID NO: 728 - DNA, 10 bp, synthetic construct
  source 1..10: mol_type = other DNA
atccgtagga

SEQ ID NO: 729 - DNA, 10 bp, synthetic construct
  source 1..10: mol_type = other DNA
ctctaagaga

SEQ ID NO: 730 - DNA, 10 bp, synthetic construct
  source 1..10: mol_type = other DNA
cctccttaag

SEQ ID NO: 731 - DNA, 10 bp, synthetic construct
  source 1..10: mol_type = other DNA
aattacgtta

SEQ ID NO: 732 - DNA, 10 bp, synthetic construct
  source 1..10: mol_type = other DNA
gcagtcacgt

SEQ ID NO: 733 - DNA, 10 bp, synthetic construct
  source 1..10: mol_type = other DNA
aaggcgcatc

SEQ ID NO: 734 - DNA, 10 bp, synthetic construct
  source 1..10: mol_type = other DNA
ctggatggcg

SEQ ID NO: 735 - DNA, 10 bp, synthetic construct
  source 1..10: mol_type = other DNA
ctaaggtcga

SEQ ID NO: 736 - DNA, 10 bp, synthetic construct
  source 1..10: mol_type = other DNA
aagatgaggt

SEQ ID NO: 737 - DNA, 10 bp, synthetic construct
  source 1..10: mol_type = other DNA
gagtcgcagt

SEQ ID NO: 738 - DNA, 10 bp, synthetic construct
  source 1..10: mol_type = other DNA
cggcgttgtt

SEQ ID NO: 739 - DNA, 10 bp, synthetic construct
  source 1..10: mol_type = other DNA
ggagtgactc

SEQ ID NO: 740 - DNA, 10 bp, synthetic construct
  source 1..10: mol_type = other DNA
cgtagtgttg

SEQ ID NO: 741 - DNA, 10 bp, synthetic construct
  source 1..10: mol_type = other DNA
cgtctgcata

SEQ ID NO: 742 - DNA, 10 bp, synthetic construct
  source 1..10: mol_type = other DNA
cgatacaagg

SEQ ID NO: 743 - DNA, 10 bp, synthetic construct
  source 1..10: mol_type = other DNA
cgcgcgttgc

SEQ ID NO: 744 - DNA, 10 bp, synthetic construct
  source 1..10: mol_type = other DNA
tagaggcgga

SEQ ID NO: 745 - DNA, 10 bp, synthetic construct
  source 1..10: mol_type = other DNA
attctccgtt

SEQ ID NO: 746 - DNA, 10 bp, synthetic construct
  source 1..10: mol_type = other DNA
ccagcgtatc

SEQ ID NO: 747 - DNA, 10 bp, synthetic construct
  source 1..10: mol_type = other DNA
agaactaggc

SEQ ID NO: 748 - DNA, 10 bp, synthetic construct
  source 1..10: mol_type = other DNA
tgtgcgagcc

SEQ ID NO: 749 - DNA, 10 bp, synthetic construct
  source 1..10: mol_type = other DNA
ccagatcttc

SEQ ID NO: 750 - DNA, 10 bp, synthetic construct
  source 1..10: mol_type = other DNA
ggaaggcgcc

SEQ ID NO: 751 - DNA, 10 bp, synthetic construct
  source 1..10: mol_type = other DNA
tgtctaggag

SEQ ID NO: 752 - DNA, 10 bp, synthetic construct
  source 1..10: mol_type = other DNA
gtgccgaggt

SEQ ID NO: 753 - DNA, 10 bp, synthetic construct
  source 1..10: mol_type = other DNA
taggtccgag

SEQ ID NO: 754 - DNA, 10 bp, synthetic construct
  source 1..10: mol_type = other DNA
ctgattaatg

SEQ ID NO: 755 - DNA, 10 bp, synthetic construct
  source 1..10: mol_type = other DNA
gttagacgtg

SEQ ID NO: 756 - DNA, 10 bp, synthetic construct
  source 1..10: mol_type = other DNA
cttcgtctct

SEQ ID NO: 757 - DNA, 10 bp, synthetic construct
  source 1..10: mol_type = other DNA
ttataaggcc

SEQ ID NO: 758 - DNA, 10 bp, synthetic construct
  source 1..10: mol_type = other DNA
atatcgtgac

SEQ ID NO: 759 - DNA, 10 bp, synthetic construct
  source 1..10: mol_type = other DNA
atcttggagc

SEQ ID NO: 760 - DNA, 10 bp, synthetic construct
  source 1..10: mol_type = other DNA
gaggtaattg

SEQ ID NO: 761 - DNA, 10 bp, synthetic construct
  source 1..10: mol_type = other DNA
tattgttgca

SEQ ID NO: 762 - DNA, 10 bp, synthetic construct
  source 1..10: mol_type = other DNA
cctattgtcg

SEQ ID NO: 763 - DNA, 10 bp, synthetic construct
  source 1..10: mol_type = other DNA
acatctgcta

SEQ ID NO: 764 - DNA, 10 bp, synthetic construct
  source 1..10: mol_type = other DNA
aagtaccgtg

SEQ ID NO: 765 - DNA, 10 bp, synthetic construct
  source 1..10: mol_type = other DNA
aggcggtcac

SEQ ID NO: 766 - DNA, 10 bp, synthetic construct
  source 1..10: mol_type = other DNA
aggatggtgc

SEQ ID NO: 767 - DNA, 10 bp, synthetic construct
  source 1..10: mol_type = other DNA
gcaggccgtt

SEQ ID NO: 768 - DNA, 10 bp, synthetic construct
  source 1..10: mol_type = other DNA
gttcgtggcg

SEQ ID NO: 769 - DNA, 10 bp, synthetic construct
  source 1..10: mol_type = other DNA
gcaattgttg

SEQ ID NO: 770 - DNA, 10 bp, synthetic construct
  source 1..10: mol_type = other DNA
aagtggatgg

SEQ ID NO: 771 - DNA, 10 bp, synthetic construct
  source 1..10: mol_type = other DNA
ctcctcgtct

SEQ ID NO: 772 - DNA, 10 bp, synthetic construct
  source 1..10: mol_type = other DNA
aatccgagtc

SEQ ID NO: 773 - DNA, 10 bp, synthetic construct
  source 1..10: mol_type = other DNA
atcttatgaa

SEQ ID NO: 774 - DNA, 10 bp, synthetic construct
  source 1..10: mol_type = other DNA
tactggagct

SEQ ID NO: 775 - DNA, 10 bp, synthetic construct
  source 1..10: mol_type = other DNA
aagaggacac

SEQ ID NO: 776 - DNA, 10 bp, synthetic construct
  source 1..10: mol_type = other DNA
cttcacaggt

SEQ ID NO: 777 - DNA, 10 bp, synthetic construct
  source 1..10: mol_type = other DNA
tcggaatgct

SEQ ID NO: 778 - DNA, 10 bp, synthetic construct
  source 1..10: mol_type = other DNA
gacgtggatt

SEQ ID NO: 779 - DNA, 10 bp, synthetic construct
  source 1..10: mol_type = other DNA
agaggtggtg

SEQ ID NO: 780 - DNA, 10 bp, synthetic construct
  source 1..10: mol_type = other DNA
cgctacacac

SEQ ID NO: 781 - DNA, 10 bp, synthetic construct
  source 1..10: mol_type = other DNA
gttctagtct

SEQ ID NO: 782 - DNA, 10 bp, synthetic construct
  source 1..10: mol_type = other DNA
acaggctctt

SEQ ID NO: 783 - DNA, 10 bp, synthetic construct
  source 1..10: mol_type = other DNA
ctctcctata

SEQ ID NO: 784 - DNA, 10 bp, synthetic construct
  source 1..10: mol_type = other DNA
aggtatagat

SEQ ID NO: 785 - DNA, 10 bp, synthetic construct
  source 1..10: mol_type = other DNA
cttctctgcg

SEQ ID NO: 786 - DNA, 10 bp, synthetic construct
  source 1..10: mol_type = other DNA
tctgtcttgc

SEQ ID NO: 787 - DNA, 10 bp, synthetic construct
  source 1..10: mol_type = other DNA
gtgatggtcg

SEQ ID NO: 788 - DNA, 10 bp, synthetic construct
  source 1..10: mol_type = other DNA
ctggatctca

SEQ ID NO: 789 - DNA, 10 bp, synthetic construct
  source 1..10: mol_type = other DNA
gctattctac

SEQ ID NO: 790 - DNA, 10 bp, synthetic construct
  source 1..10: mol_type = other DNA
tcctcagctg

SEQ ID NO: 791 - DNA, 10 bp, synthetic construct
  source 1..10: mol_type = other DNA
ataaggcagg

SEQ ID NO: 792 - DNA, 10 bp, synthetic construct
  source 1..10: mol_type = other DNA
ataagtcgtt

SEQ ID NO: 793 - DNA, 10 bp, synthetic construct
  source 1..10: mol_type = other DNA
tcgttatact

SEQ ID NO: 794 - DNA, 10 bp, synthetic construct
  source 1..10: mol_type = other DNA
ttggtcttat

SEQ ID NO: 795 - DNA, 10 bp, synthetic construct
  source 1..10: mol_type = other DNA
aaggtctgat

SEQ ID NO: 796 - DNA, 10 bp, synthetic construct
  source 1..10: mol_type = other DNA
gacatctgcc

SEQ ID NO: 797 - DNA, 10 bp, synthetic construct
  source 1..10: mol_type = other DNA
aggctcactt

SEQ ID NO: 798 - DNA, 10 bp, synthetic construct
  source 1..10: mol_type = other DNA
ctattcacat

SEQ ID NO: 799 - DNA, 10 bp, synthetic construct
  source 1..10: mol_type = other DNA
agcactatgt

SEQ ID NO: 800 - DNA, 10 bp, synthetic construct
  source 1..10: mol_type = other DNA
cggctaccga

SEQ ID NO: 801 - DNA, 10 bp, synthetic construct
  source 1..10: mol_type = other DNA
gccgtgtagt

SEQ ID NO: 802 - DNA, 10 bp, synthetic construct
  source 1..10: mol_type = other DNA
gcgtcaagag

SEQ ID NO: 803 - DNA, 10 bp, synthetic construct
  source 1..10: mol_type = other DNA
gaggaagacc

SEQ ID NO: 804 - DNA, 10 bp, synthetic construct
  source 1..10: mol_type = other DNA
acgtctgttg

SEQ ID NO: 805 - DNA, 10 bp, synthetic construct
  source 1..10: mol_type = other DNA
aggcgatagg

SEQ ID NO: 806 - DNA, 10 bp, synthetic construct
  source 1..10: mol_type = other DNA
tgttgtcgta

SEQ ID NO: 807 - DNA, 10 bp, synthetic construct
  source 1..10: mol_type = other DNA
acctaggcac

SEQ ID NO: 808 - DNA, 10 bp, synthetic construct
  source 1..10: mol_type = other DNA
cgtcttcagg

SEQ ID NO: 809 - DNA, 10 bp, synthetic construct
  source 1..10: mol_type = other DNA
aggcttcaat

SEQ ID NO: 810 - DNA, 10 bp, synthetic construct
  source 1..10: mol_type = other DNA
actatgctcc

SEQ ID NO: 811 - DNA, 10 bp, synthetic construct
  source 1..10: mol_type = other DNA
gtcatcttag

SEQ ID NO: 812 - DNA, 10 bp, synthetic construct
  source 1..10: mol_type = other DNA
ctcgatgtgt

SEQ ID NO: 813 - DNA, 10 bp, synthetic construct
  source 1..10: mol_type = other DNA
agagcggctt

SEQ ID NO: 814 - DNA, 10 bp, synthetic construct
  source 1..10: mol_type = other DNA
gcggatgtga

SEQ ID NO: 815 - DNA, 10 bp, synthetic construct
  source 1..10: mol_type = other DNA
ctatacggac

SEQ ID NO: 816 - DNA, 10 bp, synthetic construct
  source 1..10: mol_type = other DNA
ctgtcagact

SEQ ID NO: 817 - DNA, 10 bp, synthetic construct
  source 1..10: mol_type = other DNA
gaagaggtgc

SEQ ID NO: 818 - DNA, 10 bp, synthetic construct
  source 1..10: mol_type = other DNA
gacctatgta

SEQ ID NO: 819 - DNA, 10 bp, synthetic construct
  source 1..10: mol_type = other DNA
gaataaggct

SEQ ID NO: 820 - DNA, 10 bp, synthetic construct
  source 1..10: mol_type = other DNA
gaggcatgca

SEQ ID NO: 821 - DNA, 10 bp, synthetic construct
  source 1..10: mol_type = other DNA
ccatgaggac

SEQ ID NO: 822 - DNA, 10 bp, synthetic construct
  source 1..10: mol_type = other DNA
gagtagtctg

SEQ ID NO: 823 - DNA, 10 bp, synthetic construct
  source 1..10: mol_type = other DNA
ctgtgagagg

SEQ ID NO: 824 - DNA, 10 bp, synthetic construct
  source 1..10: mol_type = other DNA
gttggatata

SEQ ID NO: 825 - DNA, 10 bp, synthetic construct
  source 1..10: mol_type = other DNA
agtgcgagta

SEQ ID NO: 826 - DNA, 10 bp, synthetic construct
  source 1..10: mol_type = other DNA
cgtggacaat

SEQ ID NO: 827 - DNA, 10 bp, synthetic construct
  source 1..10: mol_type = other DNA
atccgtatac

SEQ ID NO: 828 - DNA, 10 bp, synthetic construct
  source 1..10: mol_type = other DNA
tactgcgtga

SEQ ID NO: 829 - DNA, 10 bp, synthetic construct
  source 1..10: mol_type = other DNA
cgtcatcgac

SEQ ID NO: 830 - DNA, 10 bp, synthetic construct
  source 1..10: mol_type = other DNA
ctgtctacct

SEQ ID NO: 831 - DNA, 10 bp, synthetic construct
  source 1..10: mol_type = other DNA
ggaggactag

SEQ ID NO: 832 - DNA, 10 bp, synthetic construct
  source 1..10: mol_type = other DNA
caaggcctca

SEQ ID NO: 833 - DNA, 10 bp, synthetic construct
  source 1..10: mol_type = other DNA
gaggtatgtt

SEQ ID NO: 834 - DNA, 10 bp, synthetic construct
  source 1..10: mol_type = other DNA
tggtacatac

SEQ ID NO: 835 - DNA, 10 bp, synthetic construct
  source 1..10: mol_type = other DNA
cttcgaacat

SEQ ID NO: 836 - DNA, 10 bp, synthetic construct
  source 1..10: mol_type = other DNA
tcttgactgt

SEQ ID NO: 837 - DNA, 10 bp, synthetic construct
  source 1..10: mol_type = other DNA
aagtgatgcg

SEQ ID NO: 838 - DNA, 10 bp, synthetic construct
  source 1..10: mol_type = other DNA
acacacaggc

SEQ ID NO: 839 - DNA, 10 bp, synthetic construct
  source 1..10: mol_type = other DNA
acttcggagg

SEQ ID NO: 840 - DNA, 10 bp, synthetic construct
  source 1..10: mol_type = other DNA
gatggacgtt

SEQ ID NO: 841 - DNA, 10 bp, synthetic construct
  source 1..10: mol_type = other DNA
cggttgtctt

SEQ ID NO: 842 - DNA, 10 bp, synthetic construct
  source 1..10: mol_type = other DNA
tctccgatgg

SEQ ID NO: 843 - DNA, 10 bp, synthetic construct
  source 1..10: mol_type = other DNA
acaaggctta

SEQ ID NO: 844 - DNA, 10 bp, synthetic construct
  source 1..10: mol_type = other DNA
tgcatctcgt

SEQ ID NO: 845 - DNA, 10 bp, synthetic construct
  source 1..10: mol_type = other DNA
cgagttggat

SEQ ID NO: 846 - DNA, 10 bp, synthetic construct
  source 1..10: mol_type = other DNA
tctggctatt

SEQ ID NO: 847 - DNA, 10 bp, synthetic construct
  source 1..10: mol_type = other DNA
ctgtattaag

SEQ ID NO: 848 - DNA, 10 bp, synthetic construct
  source 1..10: mol_type = other DNA
cgtgcgcatc

SEQ ID NO: 849 - DNA, 10 bp, synthetic construct
  source 1..10: mol_type = other DNA
tgaggcttag

SEQ ID NO: 850 - DNA, 10 bp, synthetic construct
  source 1..10: mol_type = other DNA
agcaggaggc

SEQ ID NO: 851 - DNA, 10 bp, synthetic construct
  source 1..10: mol_type = other DNA
gcgatatgta

SEQ ID NO: 852 - DNA, 10 bp, synthetic construct
  source 1..10: mol_type = other DNA
cgtgaagttc

SEQ ID NO: 853 - DNA, 10 bp, synthetic construct
  source 1..10: mol_type = other DNA
caagcgtcag

SEQ ID NO: 854 - DNA, 10 bp, synthetic construct
  source 1..10: mol_type = other DNA
aggcggatgc

SEQ ID NO: 855 - DNA, 10 bp, synthetic construct
  source 1..10: mol_type = other DNA
atacagcgtt

SEQ ID NO: 856 - DNA, 10 bp, synthetic construct
  source 1..10: mol_type = other DNA
ccatggctca

SEQ ID NO: 857 - DNA, 10 bp, synthetic construct
  source 1..10: mol_type = other DNA
gtaggctcag

SEQ ID NO: 858 - DNA, 10 bp, synthetic construct
  source 1..10: mol_type = other DNA
ctagtgtctt

SEQ ID NO: 859 - DNA, 10 bp, synthetic construct
  source 1..10: mol_type = other DNA
gacgtctcac

SEQ ID NO: 860 - DNA, 10 bp, synthetic construct
  source 1..10: mol_type = other DNA
acacatacag

SEQ ID NO: 861 - DNA, 10 bp, synthetic construct
  source 1..10: mol_type = other DNA
ataggcaata

SEQ ID NO: 862 - DNA, 10 bp, synthetic construct
  source 1..10: mol_type = other DNA
gtagagcgcg

SEQ ID NO: 863 - DNA, 10 bp, synthetic construct
  source 1..10: mol_type = other DNA
ggtatacagc

SEQ ID NO: 864 - DNA, 10 bp, synthetic construct
  source 1..10: mol_type = other DNA
agtctagttc

SEQ ID NO: 865 - DNA, 10 bp, synthetic construct
  source 1..10: mol_type = other DNA
ctacaagcgt

SEQ ID NO: 866 - DNA, 10 bp, synthetic construct
  source 1..10: mol_type = other DNA
ctgaggtgcg

SEQ ID NO: 867 - DNA, 10 bp, synthetic construct
  source 1..10: mol_type = other DNA
cgtgaatctt

SEQ ID NO: 868 - DNA, 10 bp, synthetic construct
  source 1..10: mol_type = other DNA
cgtcgactag

SEQ ID NO: 869 - DNA, 10 bp, synthetic construct
  source 1..10: mol_type = other DNA
attaagcgtg

SEQ ID NO: 870 - DNA, 10 bp, synthetic construct
  source 1..10: mol_type = other DNA
tccggcgtcg

SEQ ID NO: 871 - DNA, 10 bp, synthetic construct
  source 1..10: mol_type = other DNA
aggaggccag

SEQ ID NO: 872 - DNA, 10 bp, synthetic construct
  source 1..10: mol_type = other DNA
ggatggtgca

SEQ ID NO: 873 - DNA, 10 bp, synthetic construct
  source 1..10: mol_type = other DNA
ctggcggaag

SEQ ID NO: 874 - DNA, 10 bp, synthetic construct
  source 1..10: mol_type = other DNA
tcagttgcaa

SEQ ID NO: 875 - DNA, 10 bp, synthetic construct
  source 1..10: mol_type = other DNA
gtcttattgg

SEQ ID NO: 876 - DNA, 10 bp, synthetic construct
  source 1..10: mol_type = other DNA
gcctaagagg

SEQ ID NO: 877 - DNA, 10 bp, synthetic construct
  source 1..10: mol_type = other DNA
agtctaagga

SEQ ID NO: 878 - DNA, 10 bp, synthetic construct
  source 1..10: mol_type = other DNA
gagtctgtga

SEQ ID NO: 879 - DNA, 10 bp, synthetic construct
  source 1..10: mol_type = other DNA
ctacatcgtc

SEQ ID NO: 880 - DNA, 10 bp, synthetic construct
  source 1..10: mol_type = other DNA
tatatctcag

SEQ ID NO: 881 - DNA, 10 bp, synthetic construct
  source 1..10: mol_type = other DNA
ccgtcacgtt

SEQ ID NO: 882 - DNA, 10 bp, synthetic construct
  source 1..10: mol_type = other DNA
tatcgaggcc

SEQ ID NO: 883 - DNA, 10 bp, synthetic construct
  source 1..10: mol_type = other DNA
tgaggtatct

SEQ ID NO: 884 - DNA, 10 bp, synthetic construct
  source 1..10: mol_type = other DNA
atcgttgaat

SEQ ID NO: 885 - DNA, 10 bp, synthetic construct
  source 1..10: mol_type = other DNA
cgtgcatgta

SEQ ID NO: 886 - DNA, 10 bp, synthetic construct
  source 1..10: mol_type = other DNA
cggacacctt

SEQ ID NO: 887 - DNA, 10 bp, synthetic construct
  source 1..10: mol_type = other DNA
agtggagtcc

SEQ ID NO: 888 - DNA, 10 bp, synthetic construct
  source 1..10: mol_type = other DNA
ttgtgcatgc

SEQ ID NO: 889 - DNA, 10 bp, synthetic construct
  source 1..10: mol_type = other DNA
tctaaggcat

SEQ ID NO: 890 - DNA, 10 bp, synthetic construct
  source 1..10: mol_type = other DNA
atgaggtatc

SEQ ID NO: 891 - DNA, 10 bp, synthetic construct
  source 1..10: mol_type = other DNA
cggctgtgat

SEQ ID NO: 892 - DNA, 10 bp, synthetic construct
  source 1..10: mol_type = other DNA
ccacgtgcga

SEQ ID NO: 893 - DNA, 10 bp, synthetic construct
  source 1..10: mol_type = other DNA
ggcatggagt

SEQ ID NO: 894 - DNA, 10 bp, synthetic construct
  source 1..10: mol_type = other DNA
cgatgtcgtg

SEQ ID NO: 895 - DNA, 10 bp, synthetic construct
  source 1..10: mol_type = other DNA
gaaggctgcg

SEQ ID NO: 896 - DNA, 10 bp, synthetic construct
  source 1..10: mol_type = other DNA
gcgttatgcg

SEQ ID NO: 897 - DNA, 10 bp, synthetic construct
  source 1..10: mol_type = other DNA
cacacatgcg

SEQ ID NO: 898 - DNA, 10 bp, synthetic construct
  source 1..10: mol_type = other DNA
gcctcgaagg

SEQ ID NO: 899 - DNA, 10 bp, synthetic construct
  source 1..10: mol_type = other DNA
ccggcaggtc

SEQ ID NO: 900 - DNA, 10 bp, synthetic construct
  source 1..10: mol_type = other DNA
cgtgaaggca

SEQ ID NO: 901 - DNA, 10 bp, synthetic construct
  source 1..10: mol_type = other DNA
gcgacatcgt

SEQ ID NO: 902 - DNA, 10 bp, synthetic construct
  source 1..10: mol_type = other DNA
cgtcgcgatg

SEQ ID NO: 903 - DNA, 10 bp, synthetic construct
  source 1..10: mol_type = other DNA
gaggctgagc

SEQ ID NO: 904 - DNA, 10 bp, synthetic construct
  source 1..10: mol_type = other DNA
aggctggcct

SEQ ID NO: 905 - DNA, 10 bp, synthetic construct
  source 1..10: mol_type = other DNA
tggtgttata

SEQ ID NO: 906 - DNA, 10 bp, synthetic construct
  source 1..10: mol_type = other DNA
cgtgcgtgcg

SEQ ID NO: 907 - DNA, 10 bp, synthetic construct
  source 1..10: mol_type = other DNA
cgaggtgacg

SEQ ID NO: 908 - DNA, 10 bp, synthetic construct
  source 1..10: mol_type = other DNA
gtgttaggct

SEQ ID NO: 909 - DNA, 10 bp, synthetic construct
  source 1..10: mol_type = other DNA
cgaggcacag

SEQ ID NO: 910 - DNA, 10 bp, synthetic construct
  source 1..10: mol_type = other DNA
cgcgtctcag

SEQ ID NO: 911 - DNA, 10 bp, synthetic construct
  source 1..10: mol_type = other DNA
tatagctgtg

SEQ ID NO: 912 - DNA, 10 bp, synthetic construct
  source 1..10: mol_type = other DNA
cttagtactc

SEQ ID NO: 913 - DNA, 10 bp, synthetic construct
  source 1..10: mol_type = other DNA
atcgtctctc

SEQ ID NO: 914 - DNA, 10 bp, synthetic construct
  source 1..10: mol_type = other DNA
ttcaggctta

SEQ ID NO: 915 - DNA, 10 bp, synthetic construct
  source 1..10: mol_type = other DNA
tcgtgtcacg

SEQ ID NO: 916 - DNA, 10 bp, synthetic construct
  source 1..10: mol_type = other DNA
cttaacggaa

SEQ ID NO: 917 - DNA, 10 bp, synthetic construct
  source 1..10: mol_type = other DNA
gaggcgtggc

SEQ ID NO: 918 - DNA, 10 bp, synthetic construct
  source 1..10: mol_type = other DNA
tatagcgtag

SEQ ID NO: 919 - DNA, 10 bp, synthetic construct
  source 1..10: mol_type = other DNA
tgcaagtcag

SEQ ID NO: 920 - DNA, 10 bp, synthetic construct
  source 1..10: mol_type = other DNA
cgtgccgcat

SEQ ID NO: 921 - DNA, 10 bp, synthetic construct
  source 1..10: mol_type = other DNA
gtgagtacgt

SEQ ID NO: 922 - DNA, 10 bp, synthetic construct
  source 1..10: mol_type = other DNA
ttacgtaagc

SEQ ID NO: 923 - DNA, 10 bp, synthetic construct
  source 1..10: mol_type = other DNA
ggagtcgagg

SEQ ID NO: 924 - DNA, 10 bp, synthetic construct
  source 1..10: mol_type = other DNA
atggcgtctc

SEQ ID NO: 925 - DNA, 10 bp, synthetic construct
  source 1..10: mol_type = other DNA
cgatctccgt

SEQ ID NO: 926 - DNA, 10 bp, synthetic construct
  source 1..10: mol_type = other DNA
acgaattata

SEQ ID NO: 927 - DNA, 10 bp, synthetic construct
  source 1..10: mol_type = other DNA
aggctcggtc

SEQ ID NO: 928 - DNA, 10 bp, synthetic construct
  source 1..10: mol_type = other DNA
atgcagtcga

SEQ ID NO: 929 - DNA, 10 bp, synthetic construct
  source 1..10: mol_type = other DNA
atctcgtatc

SEQ ID NO: 930 - DNA, 10 bp, synthetic construct
  source 1..10: mol_type = other DNA
aatcttatgg

SEQ ID NO: 931 - DNA, 10 bp, synthetic construct
  source 1..10: mol_type = other DNA
cgaacttgat

SEQ ID NO: 932 - DNA, 10 bp, synthetic construct
  source 1..10: mol_type = other DNA
aggtgcgtcg

SEQ ID NO: 933 - DNA, 10 bp, synthetic construct
  source 1..10: mol_type = other DNA
ttatactaca

SEQ ID NO: 934 - DNA, 10 bp, synthetic construct
  source 1..10: mol_type = other DNA
gcaacgcgtt

SEQ ID NO: 935 - DNA, 10 bp, synthetic construct
  source 1..10: mol_type = other DNA
catggtgtgt

SEQ ID NO: 936 - DNA, 10 bp, synthetic construct
  source 1..10: mol_type = other DNA
ctgtggataa

SEQ ID NO: 937 - DNA, 10 bp, synthetic construct
  source 1..10: mol_type = other DNA
ttggaagttc

SEQ ID NO: 938 - DNA, 10 bp, synthetic construct
  source 1..10: mol_type = other DNA
agtactaatg

SEQ ID NO: 939 - DNA, 10 bp, synthetic construct
  source 1..10: mol_type = other DNA
agaagaggac

SEQ ID NO: 940 - DNA, 10 bp, synthetic construct
  source 1..10: mol_type = other DNA
gttgattgta

SEQ ID NO: 941 - DNA, 10 bp, synthetic construct
  source 1..10: mol_type = other DNA
gcgagcgttg

SEQ ID NO: 942 - DNA, 10 bp, synthetic construct
  source 1..10: mol_type = other DNA
ttcggaagga

SEQ ID NO: 943 - DNA, 10 bp, synthetic construct
  source 1..10: mol_type = other DNA
tgatcggagc

SEQ ID NO: 944 - DNA, 10 bp, synthetic construct
  source 1..10: mol_type = other DNA
ctcgagactt

SEQ ID NO: 945 - DNA, 10 bp, synthetic construct
  source 1..10: mol_type = other DNA
tcaatcgatt

SEQ ID NO: 946 - DNA, 10 bp, synthetic construct
  source 1..10: mol_type = other DNA
aagagcgcta

SEQ ID NO: 947 - DNA, 10 bp, synthetic construct
  source 1..10: mol_type = other DNA
catgagtgag

SEQ ID NO: 948 - DNA, 10 bp, synthetic construct
  source 1..10: mol_type = other DNA
tcacgcgcgt

SEQ ID NO: 949 - DNA, 10 bp, synthetic construct
  source 1..10: mol_type = other DNA
gttgtgagct

SEQ ID NO: 950 - DNA, 10 bp, synthetic construct
  source 1..10: mol_type = other DNA
gctagcgagg

SEQ ID NO: 951 - DNA, 10 bp, synthetic construct
  source 1..10: mol_type = other DNA
gcgcagcgag

SEQ ID NO: 952 - DNA, 10 bp, synthetic construct
  source 1..10: mol_type = other DNA
ctatgagtca

SEQ ID NO: 953 - DNA, 10 bp, synthetic construct
  source 1..10: mol_type = other DNA
ccgtgcatca

SEQ ID NO: 954 - DNA, 10 bp, synthetic construct
  source 1..10: mol_type = other DNA
aattagtgtc

SEQ ID NO: 955 - DNA, 10 bp, synthetic construct
  source 1..10: mol_type = other DNA
cggactgtgc

SEQ ID NO: 956 - DNA, 10 bp, synthetic construct
  source 1..10: mol_type = other DNA
cgtgttacgg

SEQ ID NO: 957 - DNA, 10 bp, synthetic construct
  source 1..10: mol_type = other DNA
tacaaggctg

SEQ ID NO: 958 - DNA, 10 bp, synthetic construct
  source 1..10: mol_type = other DNA
gtattaatag

SEQ ID NO: 959 - DNA, 10 bp, synthetic construct
  source 1..10: mol_type = other DNA
gcctcggata

SEQ ID NO: 960 - DNA, 10 bp, synthetic construct
  source 1..10: mol_type = other DNA
gacgtccgaa

SEQ ID NO: 961 - DNA, 10 bp, synthetic construct
  source 1..10: mol_type = other DNA
gttatgatat

SEQ ID NO: 962 - DNA, 10 bp, synthetic construct
  source 1..10: mol_type = other DNA
taggcgtcta

SEQ ID NO: 963 - DNA, 10 bp, synthetic construct
  source 1..10: mol_type = other DNA
cctatatagc

SEQ ID NO: 964 - DNA, 10 bp, synthetic construct
  source 1..10: mol_type = other DNA
ttgaattcac

SEQ ID NO: 965 - DNA, 10 bp, synthetic construct
  source 1..10: mol_type = other DNA
gctctctata

SEQ ID NO: 966 - DNA, 10 bp, synthetic construct
  source 1..10: mol_type = other DNA
attcatctcc

SEQ ID NO: 967 - DNA, 10 bp, synthetic construct
  source 1..10: mol_type = other DNA
atggaagcgg

SEQ ID NO: 968 - DNA, 10 bp, synthetic construct
  source 1..10: mol_type = other DNA
caggtagcta

SEQ ID NO: 969 - DNA, 10 bp, synthetic construct
  source 1..10: mol_type = other DNA
ccgtgaattc

SEQ ID NO: 970 - DNA, 10 bp, synthetic construct
  source 1..10: mol_type = other DNA
cgtgtcggtg

SEQ ID NO: 971 - DNA, 10 bp, synthetic construct
  source 1..10: mol_type = other DNA
ccgtcgagtg

SEQ ID NO: 972 - DNA, 10 bp, synthetic construct
  source 1..10: mol_type = other DNA
aggacgtcgt

SEQ ID NO: 973 - DNA, 10 bp, synthetic construct
  source 1..10: mol_type = other DNA
gcagagtgtc

SEQ ID NO: 974 - DNA, 10 bp, synthetic construct
  source 1..10: mol_type = other DNA
ttccacgtgg

SEQ ID NO: 975 - DNA, 10 bp, synthetic construct
  source 1..10: mol_type = other DNA
tggaggctcc

SEQ ID NO: 976 - DNA, 10 bp, synthetic construct
  source 1..10: mol_type = other DNA
tggagatcgg

SEQ ID NO: 977 - DNA, 10 bp, synthetic construct
  source 1..10: mol_type = other DNA
atcttacgtg

SEQ ID NO: 978 - DNA, 10 bp, synthetic construct
  source 1..10: mol_type = other DNA
taggtgacgt

SEQ ID NO: 979 - DNA, 10 bp, synthetic construct
  source 1..10: mol_type = other DNA
gtctccttat

SEQ ID NO: 980 - DNA, 10 bp, synthetic construct
  source 1..10: mol_type = other DNA
ttgagaggct

SEQ ID NO: 981 - DNA, 10 bp, synthetic construct
  source 1..10: mol_type = other DNA
gtgtgtgtca

SEQ ID NO: 982 - DNA, 10 bp, synthetic construct
  source 1..10: mol_type = other DNA
tctagaactt

SEQ ID NO: 983 - DNA, 10 bp, synthetic construct
  source 1..10: mol_type = other DNA
gcgtgtcctg

SEQ ID NO: 984 - DNA, 10 bp, synthetic construct
  source 1..10: mol_type = other DNA
ggatccaatc

SEQ ID NO: 985 - DNA, 10 bp, synthetic construct
  source 1..10: mol_type = other DNA
gaccgatcgg

SEQ ID NO: 986 - DNA, 10 bp, synthetic construct
  source 1..10: mol_type = other DNA
tggcgtaggt

SEQ ID NO: 987 - DNA, 10 bp, synthetic construct
  source 1..10: mol_type = other DNA
gaagacgcgt

SEQ ID NO: 988 - DNA, 10 bp, synthetic construct
  source 1..10: mol_type = other DNA
cgagcgtgac

SEQ ID NO: 989 - DNA, 10 bp, synthetic construct
  source 1..10: mol_type = other DNA
gcatgccata

SEQ ID NO: 990 - DNA, 10 bp, synthetic construct
  source 1..10: mol_type = other DNA
ccgctgcgtc

SEQ ID NO: 991 - DNA, 10 bp, synthetic construct
  source 1..10: mol_type = other DNA
ccattaatgc

SEQ ID NO: 992 - DNA, 10 bp, synthetic construct
  source 1..10: mol_type = other DNA
ggcatgccta

SEQ ID NO: 993 - DNA, 10 bp, synthetic construct
  source 1..10: mol_type = other DNA
acgcgtcgtt

SEQ ID NO: 994 - DNA, 10 bp, synthetic construct
  source 1..10: mol_type = other DNA
gacaacgttg

SEQ ID NO: 995 - DNA, 10 bp, synthetic construct
  source 1..10: mol_type = other DNA
gtcatatatg

SEQ ID NO: 996 - DNA, 10 bp, synthetic construct
  source 1..10: mol_type = other DNA
ccgtcgtacc

SEQ ID NO: 997 - DNA, 10 bp, synthetic construct
  source 1..10: mol_type = other DNA
atgtgttgga

SEQ ID NO: 998 - DNA, 10 bp, synthetic construct
  source 1..10: mol_type = other DNA
aatggccatg

SEQ ID NO: 999 - DNA, 10 bp, synthetic construct
  source 1..10: mol_type = other DNA
ctactcgagt

SEQ ID NO: 1000 - DNA, 10 bp, synthetic construct
  source 1..10: mol_type = other DNA
aagagcggat

SEQ ID NO: 1001 - DNA, 10 bp, synthetic construct
  source 1..10: mol_type = other DNA
cggtcgtgga

SEQ ID NO: 1002 - DNA, 10 bp, synthetic construct
  source 1..10: mol_type = other DNA
atgtaggtac

SEQ ID NO: 1003 - DNA, 10 bp, synthetic construct
  source 1..10: mol_type = other DNA
agcgcgtacg

SEQ ID NO: 1004 - DNA, 10 bp, synthetic construct
  source 1..10: mol_type = other DNA
tagctatgcc

SEQ ID NO: 1005 - DNA, 10 bp, synthetic construct
  source 1..10: mol_type = other DNA
ctgttctatg

SEQ ID NO: 1006 - DNA, 10 bp, synthetic construct
  source 1..10: mol_type = other DNA
aagtgcgagg

SEQ ID NO: 1007 - DNA, 10 bp, synthetic construct
  source 1..10: mol_type = other DNA
cttaagctag

SEQ ID NO: 1008 - DNA, 10 bp, synthetic construct
  source 1..10: mol_type = other DNA
gaggttatga

SEQ ID NO: 1009 - DNA, 10 bp, synthetic construct
  source 1..10: mol_type = other DNA
cgtcgtgaac

SEQ ID NO: 1010 - DNA, 10 bp, synthetic construct
  source 1..10: mol_type = other DNA
tatcaattga

SEQ ID NO: 1011 - DNA, 10 bp, synthetic construct
  source 1..10: mol_type = other DNA
gtacaggata

SEQ ID NO: 1012 - DNA, 10 bp, synthetic construct
  source 1..10: mol_type = other DNA
ggagatgcat

SEQ ID NO: 1013 - DNA, 10 bp, synthetic construct
  source 1..10: mol_type = other DNA
cctgctagca

SEQ ID NO: 1014 - DNA, 10 bp, synthetic construct
  source 1..10: mol_type = other DNA
gatggttggc

SEQ ID NO: 1015 - DNA, 10 bp, synthetic construct
  source 1..10: mol_type = other DNA
tagaccggtc

SEQ ID NO: 1016 - DNA, 10 bp, synthetic construct
  source 1..10: mol_type = other DNA
ggcgtacgta

SEQ ID NO: 1017 - DNA, 10 bp, synthetic construct
  source 1..10: mol_type = other DNA
cggtggaggt

SEQ ID NO: 1018 - DNA, 10 bp, synthetic construct
  source 1..10: mol_type = other DNA
ccgattcgat

SEQ ID NO: 1019 - DNA, 10 bp, synthetic construct
  source 1..10: mol_type = other DNA
cgagtgctag

SEQ ID NO: 1020 - DNA, 10 bp, synthetic construct
  source 1..10: mol_type = other DNA
aggagttgcg

SEQ ID NO: 1021 - DNA, 10 bp, synthetic construct
  source 1..10: mol_type = other DNA
atatgagcgt

SEQ ID NO: 1022 - DNA, 10 bp, synthetic construct
  source 1..10: mol_type = other DNA
gtctcgcgta

SEQ ID NO: 1023 - DNA, 10 bp, synthetic construct
  source 1..10: mol_type = other DNA
cggagtccgg

SEQ ID NO: 1024 - DNA, 10 bp, synthetic construct
  source 1..10: mol_type = other DNA
catggaggac

SEQ ID NO: 1025 - DNA, 10 bp, synthetic construct
  source 1..10: mol_type = other DNA
aaggctaacg

SEQ ID NO: 1026 - DNA, 10 bp, synthetic construct
  source 1..10: mol_type = other DNA
aacgtgtggt

SEQ ID NO: 1027 - DNA, 10 bp, synthetic construct
  source 1..10: mol_type = other DNA
gtgccgtgtg

SEQ ID NO: 1028 - DNA, 10 bp, synthetic construct
  source 1..10: mol_type = other DNA
cgcctaggcc

SEQ ID NO: 1029 - DNA, 10 bp, synthetic construct
  source 1..10: mol_type = other DNA
tcgtgtggat

SEQ ID NO: 1030 - DNA, 10 bp, synthetic construct
  source 1..10: mol_type = other DNA
ccgcggctat

SEQ ID NO: 1031 - DNA, 10 bp, synthetic construct
  source 1..10: mol_type = other DNA
ttgtcgtgta

SEQ ID NO: 1032 - DNA, 10 bp, synthetic construct
  source 1..10: mol_type = other DNA
cttgctgtct

SEQ ID NO: 1033 - DNA, 10 bp, synthetic construct
  source 1..10: mol_type = other DNA
tagcgtgtct

SEQ ID NO: 1034 - DNA, 10 bp, synthetic construct
  source 1..10: mol_type = other DNA
tatacgctct

SEQ ID NO: 1035 - DNA, 10 bp, synthetic construct
  source 1..10: mol_type = other DNA
caagaggcta

SEQ ID NO: 1036 - DNA, 10 bp, synthetic construct
  source 1..10: mol_type = other DNA
ttcgatatcg

SEQ ID NO: 1037 - DNA, 10 bp, synthetic construct
  source 1..10: mol_type = other DNA
atgtctctac

SEQ ID NO: 1038 - DNA, 10 bp, synthetic construct
  source 1..10: mol_type = other DNA
ccggcttggc

SEQ ID NO: 1039 - DNA, 10 bp, synthetic construct
  source 1..10: mol_type = other DNA
ccgatcgcgg

SEQ ID NO: 1040 - DNA, 10 bp, synthetic construct
  source 1..10: mol_type = other DNA
cactagtgcg

SEQ ID NO: 1041 - DNA, 10 bp, synthetic construct
  source 1..10: mol_type = other DNA
cgtgtcttcc

SEQ ID NO: 1042 - DNA, 10 bp, synthetic construct
  source 1..10: mol_type = other DNA
ccgtatatac

SEQ ID NO: 1043 - DNA, 10 bp, synthetic construct
  source 1..10: mol_type = other DNA
ccgtgtctga

SEQ ID NO: 1044 - DNA, 10 bp, synthetic construct
  source 1..10: mol_type = other DNA
ccggagtcgc

SEQ ID NO: 1045 - DNA, 10 bp, synthetic construct
  source 1..10: mol_type = other DNA
cggatcatcc

SEQ ID NO: 1046 - DNA, 10 bp, synthetic construct
  source 1..10: mol_type = other DNA
ctatgttacg

SEQ ID NO: 1047 - DNA, 10 bp, synthetic construct
  source 1..10: mol_type = other DNA
tataccagga

SEQ ID NO: 1048 - DNA, 10 bp, synthetic construct
  source 1..10: mol_type = other DNA
gatgaggagt

SEQ ID NO: 1049 - DNA, 10 bp, synthetic construct
  source 1..10: mol_type = other DNA
gtgtctccat

SEQ ID NO: 1050 - DNA, 10 bp, synthetic construct
  source 1..10: mol_type = other DNA
gagagcgtca

SEQ ID NO: 1051 - DNA, 10 bp, synthetic construct
  source 1..10: mol_type = other DNA
atgttgagca

SEQ ID NO: 1052 - DNA, 10 bp, synthetic construct
  source 1..10: mol_type = other DNA
tatactcaat

SEQ ID NO: 1053 - DNA, 10 bp, synthetic construct
  source 1..10: mol_type = other DNA
tcggctatgt

SEQ ID NO: 1054 - DNA, 10 bp, synthetic construct
  source 1..10: mol_type = other DNA
gtaggctagc

SEQ ID NO: 1055 - DNA, 10 bp, synthetic construct
  source 1..10: mol_type = other DNA
ggagcgtcgc

SEQ ID NO: 1056 - DNA, 10 bp, synthetic construct
  source 1..10: mol_type = other DNA
atgcgaccac

SEQ ID NO: 1057 - DNA, 10 bp, synthetic construct
  source 1..10: mol_type = other DNA
ccgaaggagg

SEQ ID NO: 1058 - DNA, 10 bp, synthetic construct
  source 1..10: mol_type = other DNA
ctccgaggcg

SEQ ID NO: 1059 - DNA, 10 bp, synthetic construct
  source 1..10: mol_type = other DNA
gctatgacgt

SEQ ID NO: 1060 - DNA, 10 bp, synthetic construct
  source 1..10: mol_type = other DNA
gtctatgtgg

SEQ ID NO: 1061 - DNA, 10 bp, synthetic construct
  source 1..10: mol_type = other DNA
tatacaacct

SEQ ID NO: 1062 - DNA, 10 bp, synthetic construct
  source 1..10: mol_type = other DNA
ccgagagtcg

SEQ ID NO: 1063 - DNA, 10 bp, synthetic construct
  source 1..10: mol_type = other DNA
cttataggat

SEQ ID NO: 1064 - DNA, 10 bp, synthetic construct
  source 1..10: mol_type = other DNA
cggatataca

SEQ ID NO: 1065 - DNA, 10 bp, synthetic construct
  source 1..10: mol_type = other DNA
ggccagagtc

SEQ ID NO: 1066 - DNA, 10 bp, synthetic construct
  source 1..10: mol_type = other DNA
cggatgctgt

SEQ ID NO: 1067 - DNA, 10 bp, synthetic construct
  source 1..10: mol_type = other DNA
cgagatatac

SEQ ID NO: 1068 - DNA, 10 bp, synthetic construct
  source 1..10: mol_type = other DNA
ggatccaggt

SEQ ID NO: 1069 - DNA, 10 bp, synthetic construct
  source 1..10: mol_type = other DNA
gtaattacac

SEQ ID NO: 1070 - DNA, 10 bp, synthetic construct
  source 1..10: mol_type = other DNA
cacgtgagta

SEQ ID NO: 1071 - DNA, 10 bp, synthetic construct
  source 1..10: mol_type = other DNA
ccttaaggaa

SEQ ID NO: 1072 - DNA, 10 bp, synthetic construct
  source 1..10: mol_type = other DNA
agattataat

SEQ ID NO: 1073 - DNA, 10 bp, synthetic construct
  source 1..10: mol_type = other DNA
agtctcttat

SEQ ID NO: 1074 - DNA, 10 bp, synthetic construct
  source 1..10: mol_type = other DNA
aaggctatgc

SEQ ID NO: 1075 - DNA, 10 bp, synthetic construct
  source 1..10: mol_type = other DNA
taatattaag

SEQ ID NO: 1076 - DNA, 10 bp, synthetic construct
  source 1..10: mol_type = other DNA
tgcaagatcc

SEQ ID NO: 1077 - DNA, 10 bp, synthetic construct
  source 1..10: mol_type = other DNA
tgtcgatcga

SEQ ID NO: 1078 - DNA, 10 bp, synthetic construct
  source 1..10: mol_type = other DNA
agatcggtta

SEQ ID NO: 1079 - DNA, 10 bp, synthetic construct
  source 1..10: mol_type = other DNA
cacgccaacg

SEQ ID NO: 1080 - DNA, 10 bp, synthetic construct
  source 1..10: mol_type = other DNA
taagtaacga

SEQ ID NO: 1081 - DNA, 10 bp, synthetic construct
  source 1..10: mol_type = other DNA
acaagaatcc

SEQ ID NO: 1082 - DNA, 10 bp, synthetic construct
  source 1..10: mol_type = other DNA
tagttcacca

SEQ ID NO: 1083 - DNA, 10 bp, synthetic construct
  source 1..10: mol_type = other DNA
acaccgacct

SEQ ID NO: 1084 - DNA, 10 bp, synthetic construct
  source 1..10: mol_type = other DNA
accaatgtaa

SEQ ID NO: 1085 - DNA, 10 bp, synthetic construct
  source 1..10: mol_type = other DNA
attcagtaag

SEQ ID NO: 1086 - DNA, 10 bp, synthetic construct
  source 1..10: mol_type = other DNA
cctcgcctga

SEQ ID NO: 1087 - DNA, 10 bp, synthetic construct
  source 1..10: mol_type = other DNA
acgagataga

SEQ ID NO: 1088 - DNA, 10 bp, synthetic construct
  source 1..10: mol_type = other DNA
tgctcgccta

SEQ ID NO: 1089 - DNA, 10 bp, synthetic construct
  source 1..10: mol_type = other DNA
cctattcggc

SEQ ID NO: 1090 - DNA, 10 bp, synthetic construct
  source 1..10: mol_type = other DNA
ccgctgaacc

SEQ ID NO: 1091 - DNA, 10 bp, synthetic construct
  source 1..10: mol_type = other DNA
tagcagtatc

SEQ ID NO: 1092 - DNA, 10 bp, synthetic construct
  source 1..10: mol_type = other DNA
agacattacg

SEQ ID NO: 1093 - DNA, 10 bp, synthetic construct
  source 1..10: mol_type = other DNA
ccttacctca

SEQ ID NO: 1094 - DNA, 10 bp, synthetic construct
  source 1..10: mol_type = other DNA
cagtacgaat

SEQ ID NO: 1095 - DNA, 10 bp, synthetic construct
  source 1..10: mol_type = other DNA
tgataaccta

SEQ ID NO: 1096 - DNA, 10 bp, synthetic construct
  source 1..10: mol_type = other DNA
cctgattacg

SEQ ID NO: 1097 - DNA, 10 bp, synthetic construct
  source 1..10: mol_type = other DNA
cactgaagca

SEQ ID NO: 1098 - DNA, 10 bp, synthetic construct
  source 1..10: mol_type = other DNA
tgtattccat

SEQ ID NO: 1099 - DNA, 10 bp, synthetic construct
  source 1..10: mol_type = other DNA
cctcaagcca

SEQ ID NO: 1100 - DNA, 10 bp, synthetic construct
  source 1..10: mol_type = other DNA
tagcaagcca

SEQ ID NO: 1101 - DNA, 10 bp, synthetic construct
  source 1..10: mol_type = other DNA
acttgccacg

SEQ ID NO: 1102 - DNA, 10 bp, synthetic construct
  source 1..10: mol_type = other DNA
cagacgccgg

SEQ ID NO: 1103 - DNA, 10 bp, synthetic construct
  source 1..10: mol_type = other DNA
caactaatcg

SEQ ID NO: 1104 - DNA, 10 bp, synthetic construct
  source 1..10: mol_type = other DNA
tggactcgca

SEQ ID NO: 1105 - DNA, 10 bp, synthetic construct
  source 1..10: mol_type = other DNA
cgccgacaac

SEQ ID NO: 1106 - DNA, 10 bp, synthetic construct
  source 1..10: mol_type = other DNA
ccagataatg

SEQ ID NO: 1107 - DNA, 10 bp, synthetic construct
  source 1..10: mol_type = other DNA
tgagatagta

SEQ ID NO: 1108 - DNA, 10 bp, synthetic construct
  source 1..10: mol_type = other DNA
aactgacgag

SEQ ID NO: 1109 - DNA, 10 bp, synthetic construct
  source 1..10: mol_type = other DNA
taagccgatg

SEQ ID NO: 1110 - DNA, 10 bp, synthetic construct
  source 1..10: mol_type = other DNA
cattgacact

SEQ ID NO: 1111 - DNA, 10 bp, synthetic construct
  source 1..10: mol_type = other DNA
ccttgataat

SEQ ID NO: 1112 - DNA, 10 bp, synthetic construct
  source 1..10: mol_type = other DNA
tagtatgacg

SEQ ID NO: 1113 - DNA, 10 bp, synthetic construct
  source 1..10: mol_type = other DNA
agaactgctc

SEQ ID NO: 1114 - DNA, 10 bp, synthetic construct
  source 1..10: mol_type = other DNA
tacaattcca

SEQ ID NO: 1115 - DNA, 10 bp, synthetic construct
  source 1..10: mol_type = other DNA
tgtacctaga

SEQ ID NO: 1116 - DNA, 10 bp, synthetic construct
  source 1..10: mol_type = other DNA
taatccattc

SEQ ID NO: 1117 - DNA, 10 bp, synthetic construct
  source 1..10: mol_type = other DNA
tgcctccatg

SEQ ID NO: 1118 - DNA, 10 bp, synthetic construct
  source 1..10: mol_type = other DNA
ataccacggc

SEQ ID NO: 1119 - DNA, 10 bp, synthetic construct
  source 1..10: mol_type = other DNA
agttgtattc

SEQ ID NO: 1120 - DNA, 10 bp, synthetic construct
  source 1..10: mol_type = other DNA
tagctccatt

SEQ ID NO: 1121 - DNA, 10 bp, synthetic construct
  source 1..10: mol_type = other DNA
attgcagtaa

SEQ ID NO: 1122 - DNA, 10 bp, synthetic construct
  source 1..10: mol_type = other DNA
tgttcaatag

SEQ ID NO: 1123 - DNA, 10 bp, synthetic construct
  source 1..10: mol_type = other DNA
ccggtgacgg

SEQ ID NO: 1124 - DNA, 10 bp, synthetic construct
  source 1..10: mol_type = other DNA
cggtatcata

SEQ ID NO: 1125 - DNA, 10 bp, synthetic construct
  source 1..10: mol_type = other DNA
aactactacg

SEQ ID NO: 1126 - DNA, 10 bp, synthetic construct
  source 1..10: mol_type = other DNA
ccaattactg

SEQ ID NO: 1127 - DNA, 10 bp, synthetic construct
  source 1..10: mol_type = other DNA
ccgcacgcta

SEQ ID NO: 1128 - DNA, 10 bp, synthetic construct
  source 1..10: mol_type = other DNA
ccttggtatg

SEQ ID NO: 1129 - DNA, 10 bp, synthetic construct
  source 1..10: mol_type = other DNA
tgcagcacga

SEQ ID NO: 1130 - DNA, 10 bp, synthetic construct
  source 1..10: mol_type = other DNA
atagccaagc

SEQ ID NO: 1131 - DNA, 10 bp, synthetic construct
  source 1..10: mol_type = other DNA
ttagtagacc

SEQ ID NO: 1132 - DNA, 10 bp, synthetic construct
  source 1..10: mol_type = other DNA
taagaactaa

SEQ ID NO: 1133 - DNA, 10 bp, synthetic construct
  source 1..10: mol_type = other DNA
cacgattaag

SEQ ID NO: 1134 - DNA, 10 bp, synthetic construct
  source 1..10: mol_type = other DNA
cacagtgtag

SEQ ID NO: 1135 - DNA, 10 bp, synthetic construct
  source 1..10: mol_type = other DNA
acacgaattg

SEQ ID NO: 1136 - DNA, 10 bp, synthetic construct
  source 1..10: mol_type = other DNA
tagcaccgac

SEQ ID NO: 1137 - DNA, 10 bp, synthetic construct
  source 1..10: mol_type = other DNA
caagaataac

SEQ ID NO: 1138 - DNA, 10 bp, synthetic construct
  source 1..10: mol_type = other DNA
aagccgcact

SEQ ID NO: 1139 - DNA, 10 bp, synthetic construct
  source 1..10: mol_type = other DNA
agttcagatt

SEQ ID NO: 1140 - DNA, 10 bp, synthetic construct
  source 1..10: mol_type = other DNA
tcaccacgat

SEQ ID NO: 1141 - DNA, 10 bp, synthetic construct
  source 1..10: mol_type = other DNA
cagcgattgt

SEQ ID NO: 1142 - DNA, 10 bp, synthetic construct
  source 1..10: mol_type = other DNA
tgccagcgcg

SEQ ID NO: 1143 - DNA, 10 bp, synthetic construct
  source 1..10: mol_type = other DNA
tggctcctca

SEQ ID NO: 1144 - DNA, 10 bp, synthetic construct
  source 1..10: mol_type = other DNA
tgacctcgcc

SEQ ID NO: 1145 - DNA, 10 bp, synthetic construct
  source 1..10: mol_type = other DNA
tacgactcaa

SEQ ID NO: 1146 - DNA, 10 bp, synthetic construct
  source 1..10: mol_type = other DNA
taattgccaa

SEQ ID NO: 1147 - DNA, 10 bp, synthetic construct
  source 1..10: mol_type = other DNA
aacggcgata

SEQ ID NO: 1148 - DNA, 10 bp, synthetic construct
  source 1..10: mol_type = other DNA
ctcgattcca

SEQ ID NO: 1149 - DNA, 10 bp, synthetic construct
  source 1..10: mol_type = other DNA
atacgcttcg

SEQ ID NO: 1150 - DNA, 10 bp, synthetic construct
  source 1..10: mol_type = other DNA
tgatgatgat

SEQ ID NO: 1151 - DNA, 10 bp, synthetic construct
  source 1..10: mol_type = other DNA
ctacctgaat

SEQ ID NO: 1152 - DNA, 10 bp, synthetic construct
  source 1..10: mol_type = other DNA
ctacactcaa

SEQ ID NO: 1153 - DNA, 10 bp, synthetic construct
  source 1..10: mol_type = other DNA
ttgtgatagc

SEQ ID NO: 1154 - DNA, 10 bp, synthetic construct
  source 1..10: mol_type = other DNA
caattcgcgc

SEQ ID NO: 1155 - DNA, 10 bp, synthetic construct
  source 1..10: mol_type = other DNA
catggcattg

SEQ ID NO: 1156 - DNA, 10 bp, synthetic construct
  source 1..10: mol_type = other DNA
cttctgactt

SEQ ID NO: 1157 - DNA, 10 bp, synthetic construct
  source 1..10: mol_type = other DNA
agagaaccaa

SEQ ID NO: 1158 - DNA, 10 bp, synthetic construct
  source 1..10: mol_type = other DNA
attcacaaga

SEQ ID NO: 1159 - DNA, 10 bp, synthetic construct
  source 1..10: mol_type = other DNA
caccagctaa

SEQ ID NO: 1160 - DNA, 10 bp, synthetic construct
  source 1..10: mol_type = other DNA
caagttagcg

SEQ ID NO: 1161 - DNA, 10 bp, synthetic construct
  source 1..10: mol_type = other DNA
tgcgccttcg

SEQ ID NO: 1162 - DNA, 10 bp, synthetic construct
  source 1..10: mol_type = other DNA
ccaaccacat

SEQ ID NO: 1163 - DNA, 10 bp, synthetic construct
  source 1..10: mol_type = other DNA
acgccatgta

SEQ ID NO: 1164 - DNA, 10 bp, synthetic construct
  source 1..10: mol_type = other DNA
cagttagacg

SEQ ID NO: 1165 - DNA, 10 bp, synthetic construct
  source 1..10: mol_type = other DNA
cctcaattag

SEQ ID NO: 1166 - DNA, 10 bp, synthetic construct
  source 1..10: mol_type = other DNA
aacactggta

SEQ ID NO: 1167 - DNA, 10 bp, synthetic construct
  source 1..10: mol_type = other DNA
aatccgctaa

SEQ ID NO: 1168 - DNA, 10 bp, synthetic construct
  source 1..10: mol_type = other DNA
tggaaccata

SEQ ID NO: 1169 - DNA, 10 bp, synthetic construct
  source 1..10: mol_type = other DNA
tcgctcaaca

SEQ ID NO: 1170 - DNA, 10 bp, synthetic construct
  source 1..10: mol_type = other DNA
actaccagta

SEQ ID NO: 1171 - DNA, 10 bp, synthetic construct
  source 1..10: mol_type = other DNA
cctgaaccga

SEQ ID NO: 1172 - DNA, 10 bp, synthetic construct
  source 1..10: mol_type = other DNA
ttgccgactc

SEQ ID NO: 1173 - DNA, 10 bp, synthetic construct
  source 1..10: mol_type = other DNA
cctagacgct

SEQ ID NO: 1174 - DNA, 10 bp, synthetic construct
  source 1..10: mol_type = other DNA
ataccaacta

SEQ ID NO: 1175 - DNA, 10 bp, synthetic construct
  source 1..10: mol_type = other DNA
caataccacc

SEQ ID NO: 1176 - DNA, 10 bp, synthetic construct
  source 1..10: mol_type = other DNA
atgagagaac

SEQ ID NO: 1177 - DNA, 10 bp, synthetic construct
  source 1..10: mol_type = other DNA
ggaactaagt

SEQ ID NO: 1178 - DNA, 10 bp, synthetic construct
  source 1..10: mol_type = other DNA
agatagaacc

SEQ ID NO: 1179 - DNA, 10 bp, synthetic construct
  source 1..10: mol_type = other DNA
aattactcca

SEQ ID NO: 1180 - DNA, 10 bp, synthetic construct
  source 1..10: mol_type = other DNA
tgcttcaatt

SEQ ID NO: 1181 - DNA, 10 bp, synthetic construct
  source 1..10: mol_type = other DNA
cagtggtaca

SEQ ID NO: 1182 - DNA, 10 bp, synthetic construct
  source 1..10: mol_type = other DNA
ggcggttgtg

SEQ ID NO: 1183 - DNA, 10 bp, synthetic construct
  source 1..10: mol_type = other DNA
acacggtgcc

SEQ ID NO: 1184 - DNA, 10 bp, synthetic construct
  source 1..10: mol_type = other DNA
catgtcacta

SEQ ID NO: 1185 - DNA, 10 bp, synthetic construct
  source 1..10: mol_type = other DNA
ctactgatgt

SEQ ID NO: 1186 - DNA, 10 bp, synthetic construct
  source 1..10: mol_type = other DNA
acagccttac

SEQ ID NO: 1187 - DNA, 10 bp, synthetic construct
  source 1..10: mol_type = other DNA
agttacagcg

SEQ ID NO: 1188 - DNA, 10 bp, synthetic construct
  source 1..10: mol_type = other DNA
tatatagatt

SEQ ID NO: 1189 - DNA, 10 bp, synthetic construct
  source 1..10: mol_type = other DNA
taccgcaatc

SEQ ID NO: 1190 - DNA, 10 bp, synthetic construct
  source 1..10: mol_type = other DNA
acgatagtgg

SEQ ID NO: 1191 - DNA, 10 bp, synthetic construct
  source 1..10: mol_type = other DNA
atacgatagc

SEQ ID NO: 1192 - DNA, 10 bp, synthetic construct
  source 1..10: mol_type = other DNA
cggttcctcg

SEQ ID NO: 1193 - DNA, 10 bp, synthetic construct
  source 1..10: mol_type = other DNA
tacggagtaa

SEQ ID NO: 1194 - DNA, 10 bp, synthetic construct
  source 1..10: mol_type = other DNA
acacgcataa

SEQ ID NO: 1195 - DNA, 10 bp, synthetic construct
  source 1..10: mol_type = other DNA
cataagattc

SEQ ID NO: 1196 - DNA, 10 bp, synthetic construct
  source 1..10: mol_type = other DNA
taccagacgc

SEQ ID NO: 1197 - DNA, 10 bp, synthetic construct
  source 1..10: mol_type = other DNA
tcattcctaa

SEQ ID NO: 1198 - DNA, 10 bp, synthetic construct
  source 1..10: mol_type = other DNA
catacgaata

SEQ ID NO: 1199 - DNA, 10 bp, synthetic construct
  source 1..10: mol_type = other DNA
cttgaacact

SEQ ID NO: 1200 - DNA, 10 bp, synthetic construct
  source 1..10: mol_type = other DNA
tgacggctaa

SEQ ID NO: 1201 - DNA, 10 bp, synthetic construct
  source 1..10: mol_type = other DNA
tatgtaagct

SEQ ID NO: 1202 - DNA, 10 bp, synthetic construct
  source 1..10: mol_type = other DNA
acggaccagc

SEQ ID NO: 1203 - DNA, 10 bp, synthetic construct
  source 1..10: mol_type = other DNA
ggcagatgag

SEQ ID NO: 1204 - DNA, 10 bp, synthetic construct
  source 1..10: mol_type = other DNA
agaagtatag

SEQ ID NO: 1205 - DNA, 10 bp, synthetic construct
  source 1..10: mol_type = other DNA
taataatctg

SEQ ID NO: 1206 - DNA, 10 bp, synthetic construct
  source 1..10: mol_type = other DNA
aatcgcctcg

SEQ ID NO: 1207 - DNA, 10 bp, synthetic construct
  source 1..10: mol_type = other DNA
ccttgtggtg

SEQ ID NO: 1208 - DNA, 10 bp, synthetic construct
  source 1..10: mol_type = other DNA
ggaatagata

SEQ ID NO: 1209 - DNA, 10 bp, synthetic construct
  source 1..10: mol_type = other DNA
cagaagttgg

SEQ ID NO: 1210 - DNA, 10 bp, synthetic construct
  source 1..10: mol_type = other DNA
tggtagagtt

SEQ ID NO: 1211 - DNA, 10 bp, synthetic construct
  source 1..10: mol_type = other DNA
attcaccaat

SEQ ID NO: 1212 - DNA, 10 bp, synthetic construct
  source 1..10: mol_type = other DNA
cctggtaact

SEQ ID NO: 1213 - DNA, 10 bp, synthetic construct
  source 1..10: mol_type = other DNA
catcggtaga

SEQ ID NO: 1214 - DNA, 10 bp, synthetic construct
  source 1..10: mol_type = other DNA
ttcttgactt

SEQ ID NO: 1215 - DNA, 10 bp, synthetic construct
  source 1..10: mol_type = other DNA
ctgaccacca

SEQ ID NO: 1216 - DNA, 10 bp, synthetic construct
  source 1..10: mol_type = other DNA
tgagcggcgg

SEQ ID NO: 1217 - DNA, 10 bp, synthetic construct
  source 1..10: mol_type = other DNA
acggagacag

SEQ ID NO: 1218 - DNA, 10 bp, synthetic construct
  source 1..10: mol_type = other DNA
catataacag

SEQ ID NO: 1219 - DNA, 10 bp, synthetic construct
  source 1..10: mol_type = other DNA
cactcacacc

SEQ ID NO: 1220 - DNA, 10 bp, synthetic construct
  source 1..10: mol_type = other DNA
cctgcctcac

SEQ ID NO: 1221 - DNA, 10 bp, synthetic construct
  source 1..10: mol_type = other DNA
tgaagttgag

SEQ ID NO: 1222 - DNA, 10 bp, synthetic construct
  source 1..10: mol_type = other DNA
catagcgacc

SEQ ID NO: 1223 - DNA, 10 bp, synthetic construct
  source 1..10: mol_type = other DNA
acagcgacgc

SEQ ID NO: 1224 - DNA, 10 bp, synthetic construct
  source 1..10: mol_type = other DNA
actgctcgct

SEQ ID NO: 1225 - DNA, 10 bp, synthetic construct
  source 1..10: mol_type = other DNA
ttcattggcg

SEQ ID NO: 1226 - DNA, 10 bp, synthetic construct
  source 1..10: mol_type = other DNA
catgtatagt

SEQ ID NO: 1227 - DNA, 10 bp, synthetic construct
  source 1..10: mol_type = other DNA
ctacaataat

SEQ ID NO: 1228 - DNA, 10 bp, synthetic construct
  source 1..10: mol_type = other DNA
cacgcatgtt

SEQ ID NO: 1229 - DNA, 10 bp, synthetic construct
  source 1..10: mol_type = other DNA
tggagccacg

SEQ ID NO: 1230 - DNA, 10 bp, synthetic construct
  source 1..10: mol_type = other DNA
aatgtgacgg

SEQ ID NO: 1231 - DNA, 10 bp, synthetic construct
  source 1..10: mol_type = other DNA
aactggcaca

SEQ ID NO: 1232 - DNA, 10 bp, synthetic construct
  source 1..10: mol_type = other DNA
tgagacgcgc

SEQ ID NO: 1233 - DNA, 10 bp, synthetic construct
  source 1..10: mol_type = other DNA
cagtgagcat

SEQ ID NO: 1234 - DNA, 10 bp, synthetic construct
  source 1..10: mol_type = other DNA
cgcatattcc

SEQ ID NO: 1235 - DNA, 10 bp, synthetic construct
  source 1..10: mol_type = other DNA
ctagagatag

SEQ ID NO: 1236 - DNA, 10 bp, synthetic construct
  source 1..10: mol_type = other DNA
aacctctacc

SEQ ID NO: 1237 - DNA, 10 bp, synthetic construct
  source 1..10: mol_type = other DNA
ctcatgttaa

SEQ ID NO: 1238 - DNA, 10 bp, synthetic construct
  source 1..10: mol_type = other DNA
acgcaattca

SEQ ID NO: 1239 - DNA, 10 bp, synthetic construct
  source 1..10: mol_type = other DNA
cactccatca

SEQ ID NO: 1240 - DNA, 10 bp, synthetic construct
  source 1..10: mol_type = other DNA
taccgctgat

SEQ ID NO: 1241 - DNA, 10 bp, synthetic construct
  source 1..10: mol_type = other DNA
agttgaccat

SEQ ID NO: 1242 - DNA, 10 bp, synthetic construct
  source 1..10: mol_type = other DNA
cttactgcca

SEQ ID NO: 1243 - DNA, 10 bp, synthetic construct
  source 1..10: mol_type = other DNA
atatggtaga

SEQ ID NO: 1244 - DNA, 10 bp, synthetic construct
  source 1..10: mol_type = other DNA
agatcacgag

SEQ ID NO: 1245 - DNA, 10 bp, synthetic construct
  source 1..10: mol_type = other DNA
tgtagcggcc

SEQ ID NO: 1246 - DNA, 10 bp, synthetic construct
  source 1..10: mol_type = other DNA
ccgccactct

SEQ ID NO: 1247 - DNA, 10 bp, synthetic construct
  source 1..10: mol_type = other DNA
cgaccttacc

SEQ ID NO: 1248 - DNA, 10 bp, synthetic construct
  source 1..10: mol_type = other DNA
catcgagagt

SEQ ID NO: 1249 - DNA, 10 bp, synthetic construct
  source 1..10: mol_type = other DNA
cctggtatgg

SEQ ID NO: 1250 - DNA, 10 bp, synthetic construct
  source 1..10: mol_type = other DNA
acggtcagaa

SEQ ID NO: 1251 - DNA, 10 bp, synthetic construct
  source 1..10: mol_type = other DNA
cacttgtata

SEQ ID NO: 1252 - DNA, 10 bp, synthetic construct
  source 1..10: mol_type = other DNA
cttcgacctc

SEQ ID NO: 1253 - DNA, 10 bp, synthetic construct
  source 1..10: mol_type = other DNA
ttagtgcatt

SEQ ID NO: 1254 - DNA, 10 bp, synthetic construct
  source 1..10: mol_type = other DNA
agagttaagc

SEQ ID NO: 1255 - DNA, 10 bp, synthetic construct
  source 1..10: mol_type = other DNA
cagcggagca

SEQ ID NO: 1256 - DNA, 10 bp, synthetic construct
  source 1..10: mol_type = other DNA
cgattacctc

SEQ ID NO: 1257 - DNA, 10 bp, synthetic construct
  source 1..10: mol_type = other DNA
cgaccatcct

SEQ ID NO: 1258 - DNA, 10 bp, synthetic construct
  source 1..10: mol_type = other DNA
gactattaga

SEQ ID NO: 1259 - DNA, 10 bp, synthetic construct
  source 1..10: mol_type = other DNA
ataactgata

SEQ ID NO: 1260 - DNA, 10 bp, synthetic construct
  source 1..10: mol_type = other DNA
atgaatcagc

SEQ ID NO: 1261 - DNA, 10 bp, synthetic construct
  source 1..10: mol_type = other DNA
taccttgttc

SEQ ID NO: 1262 - DNA, 10 bp, synthetic construct
  source 1..10: mol_type = other DNA
ttagatgctg

SEQ ID NO: 1263 - DNA, 10 bp, synthetic construct
  source 1..10: mol_type = other DNA
cataccgctt

SEQ ID NO: 1264 - DNA, 10 bp, synthetic construct
  source 1..10: mol_type = other DNA
tgttgcggtg

SEQ ID NO: 1265 - DNA, 10 bp, synthetic construct
  source 1..10: mol_type = other DNA
agatcctgat

SEQ ID NO: 1266 - DNA, 10 bp, synthetic construct
  source 1..10: mol_type = other DNA
ttccgctaga

SEQ ID NO: 1267 - DNA, 10 bp, synthetic construct
  source 1..10: mol_type = other DNA
ttcaacacac

SEQ ID NO: 1268 - DNA, 10 bp, synthetic construct
  source 1..10: mol_type = other DNA
tgtatgcacg

SEQ ID NO: 1269 - DNA, 10 bp, synthetic construct
  source 1..10: mol_type = other DNA
cttcagaact

SEQ ID NO: 1270 - DNA, 10 bp, synthetic construct
  source 1..10: mol_type = other DNA
aagaccactg

SEQ ID NO: 1271 - DNA, 10 bp, synthetic construct
  source 1..10: mol_type = other DNA
tgcagattgt

SEQ ID NO: 1272 - DNA, 10 bp, synthetic construct
  source 1..10: mol_type = other DNA
agaacactgt

SEQ ID NO: 1273 - DNA, 10 bp, synthetic construct
  source 1..10: mol_type = other DNA
cgcacaccag

SEQ ID NO: 1274 - DNA, 10 bp, synthetic construct
  source 1..10: mol_type = other DNA
cgcatagact

SEQ ID NO: 1275 - DNA, 10 bp, synthetic construct
  source 1..10: mol_type = other DNA
cactctacta

SEQ ID NO: 1276 - DNA, 10 bp, synthetic construct
  source 1..10: mol_type = other DNA
taatcggtga

SEQ ID NO: 1277 - DNA, 10 bp, synthetic construct
  source 1..10: mol_type = other DNA
ctaagatgct

SEQ ID NO: 1278 - DNA, 10 bp, synthetic construct
  source 1..10: mol_type = other DNA
ttcttggccg

SEQ ID NO: 1279 - DNA, 10 bp, synthetic construct
  source 1..10: mol_type = other DNA
cggtcgagac

SEQ ID NO: 1280 - DNA, 10 bp, synthetic construct
  source 1..10: mol_type = other DNA
ggaccgagtg

SEQ ID NO: 1281 - DNA, 10 bp, synthetic construct
  source 1..10: mol_type = other DNA
ccgcctccaa

SEQ ID NO: 1282 - DNA, 10 bp, synthetic construct
  source 1..10: mol_type = other DNA
tggtattcaa

SEQ ID NO: 1283 - DNA, 10 bp, synthetic construct
  source 1..10: mol_type = other DNA
aataacacct

SEQ ID NO: 1284 - DNA, 10 bp, synthetic construct
  source 1..10: mol_type = other DNA
ctcagacctg

SEQ ID NO: 1285 - DNA, 10 bp, synthetic construct
  source 1..10: mol_type = other DNA
ctaacagcac

SEQ ID NO: 1286 - DNA, 10 bp, synthetic construct
  source 1..10: mol_type = other DNA
ccagcaacgt

SEQ ID NO: 1287 - DNA, 10 bp, synthetic construct
  source 1..10: mol_type = other DNA
cggacattgg

SEQ ID NO: 1288 - DNA, 10 bp, synthetic construct
  source 1..10: mol_type = other DNA
taagctattg

SEQ ID NO: 1289 - DNA, 10 bp, synthetic construct
  source 1..10: mol_type = other DNA
agtgattctc

SEQ ID NO: 1290 - DNA, 10 bp, synthetic construct
  source 1..10: mol_type = other DNA
acagccgatc

SEQ ID NO: 1291 - DNA, 10 bp, synthetic construct
  source 1..10: mol_type = other DNA
agccaatgag

SEQ ID NO: 1292 - DNA, 10 bp, synthetic construct
  source 1..10: mol_type = other DNA
tattacctgg

SEQ ID NO: 1293 - DNA, 10 bp, synthetic construct
  source 1..10: mol_type = other DNA
tacaatgtgg

SEQ ID NO: 1294 - DNA, 10 bp, synthetic construct
  source 1..10: mol_type = other DNA
caacggaatt

SEQ ID NO: 1295 - DNA, 10 bp, synthetic construct
  source 1..10: mol_type = other DNA
gatgaatgcc

SEQ ID NO: 1296 - DNA, 10 bp, synthetic construct
  source 1..10: mol_type = other DNA
ccatcaccta

SEQ ID NO: 1297 - DNA, 10 bp, synthetic construct
  source 1..10: mol_type = other DNA
cacaactcat

SEQ ID NO: 1298 - DNA, 10 bp, synthetic construct
  source 1..10: mol_type = other DNA
cgcctaacct

SEQ ID NO: 1299 - DNA, 10 bp, synthetic construct
  source 1..10: mol_type = other DNA
cactgcgctc

SEQ ID NO: 1300 - DNA, 10 bp, synthetic construct
  source 1..10: mol_type = other DNA
atcagactgg

SEQ ID NO: 1301 - DNA, 10 bp, synthetic construct
  source 1..10: mol_type = other DNA
tatgcaagtg

SEQ ID NO: 1302 - DNA, 10 bp, synthetic construct
  source 1..10: mol_type = other DNA
catactctaa

SEQ ID NO: 1303 - DNA, 10 bp, synthetic construct
  source 1..10: mol_type = other DNA
agtgcttaca

SEQ ID NO: 1304 - DNA, 10 bp, synthetic construct
  source 1..10: mol_type = other DNA
cacatactaa

SEQ ID NO: 1305 - DNA, 10 bp, synthetic construct
  source 1..10: mol_type = other DNA
ccacatggta

SEQ ID NO: 1306 - DNA, 10 bp, synthetic construct
  source 1..10: mol_type = other DNA
cggcttgtgg

SEQ ID NO: 1307 - DNA, 10 bp, synthetic construct
  source 1..10: mol_type = other DNA
cgagactgca

SEQ ID NO: 1308 - DNA, 10 bp, synthetic construct
  source 1..10: mol_type = other DNA
ggtgtccaat

SEQ ID NO: 1309 - DNA, 10 bp, synthetic construct
  source 1..10: mol_type = other DNA
ggtactcttg

SEQ ID NO: 1310 - DNA, 10 bp, synthetic construct
  source 1..10: mol_type = other DNA
aaccattcat

SEQ ID NO: 1311 - DNA, 10 bp, synthetic construct
  source 1..10: mol_type = other DNA
ggaacgcaag

SEQ ID NO: 1312 - DNA, 10 bp, synthetic construct
  source 1..10: mol_type = other DNA
atgtacttcc

SEQ ID NO: 1313 - DNA, 10 bp, synthetic construct
  source 1..10: mol_type = other DNA
tacaacgatc

SEQ ID NO: 1314 - DNA, 10 bp, synthetic construct
  source 1..10: mol_type = other DNA
tacgcatggc

SEQ ID NO: 1315 - DNA, 10 bp, synthetic construct
  source 1..10: mol_type = other DNA
tggtccgata

SEQ ID NO: 1316 - DNA, 10 bp, synthetic construct
  source 1..10: mol_type = other DNA
ctcggcgaca

SEQ ID NO: 1317 - DNA, 10 bp, synthetic construct
  source 1..10: mol_type = other DNA
tcaatgctcg

SEQ ID NO: 1318 - DNA, 10 bp, synthetic construct
  source 1..10: mol_type = other DNA
gattcagagt

SEQ ID NO: 1319 - DNA, 10 bp, synthetic construct
  source 1..10: mol_type = other DNA
tcatggttga

SEQ ID NO: 1320 - DNA, 10 bp, synthetic construct
  source 1..10: mol_type = other DNA
cctctcaagg

SEQ ID NO: 1321 - DNA, 10 bp, synthetic construct
  source 1..10: mol_type = other DNA
aatgcagcca

SEQ ID NO: 1322 - DNA, 10 bp, synthetic construct
  source 1..10: mol_type = other DNA
ttgagtgata

SEQ ID NO: 1323 - DNA, 10 bp, synthetic construct
  source 1..10: mol_type = other DNA
actaccggcg

SEQ ID NO: 1324 - DNA, 10 bp, synthetic construct
  source 1..10: mol_type = other DNA
acatcctgcc

SEQ ID NO: 1325 - DNA, 10 bp, synthetic construct
  source 1..10: mol_type = other DNA
ctctgcaacg

SEQ ID NO: 1326 - DNA, 10 bp, synthetic construct
  source 1..10: mol_type = other DNA
ttacaagcta

SEQ ID NO: 1327 - DNA, 10 bp, synthetic construct
  source 1..10: mol_type = other DNA
actgctcttg

SEQ ID NO: 1328 - DNA, 10 bp, synthetic construct
  source 1..10: mol_type = other DNA
cacgcagctg

SEQ ID NO: 1329 - DNA, 10 bp, synthetic construct
  source 1..10: mol_type = other DNA
aattggagcc

SEQ ID NO: 1330 - DNA, 10 bp, synthetic construct
  source 1..10: mol_type = other DNA
gcagataaca

SEQ ID NO: 1331 - DNA, 10 bp, synthetic construct
  source 1..10: mol_type = other DNA
ctcatcgata

SEQ ID NO: 1332 - DNA, 10 bp, synthetic construct
  source 1..10: mol_type = other DNA
atcatgactg

SEQ ID NO: 1333 - DNA, 10 bp, synthetic construct
  source 1..10: mol_type = other DNA
gaagtatgaa

SEQ ID NO: 1334 - DNA, 10 bp, synthetic construct
  source 1..10: mol_type = other DNA
atgtaagaag

SEQ ID NO: 1335 - DNA, 10 bp, synthetic construct
  source 1..10: mol_type = other DNA
actagacgta

SEQ ID NO: 1336 - DNA, 10 bp, synthetic construct
  source 1..10: mol_type = other DNA
agctgcctag

SEQ ID NO: 1337 - DNA, 10 bp, synthetic construct
  source 1..10: mol_type = other DNA
gtgcagccta

SEQ ID NO: 1338 - DNA, 10 bp, synthetic construct
  source 1..10: mol_type = other DNA
ctctgtaagt

SEQ ID NO: 1339 - DNA, 10 bp, synthetic construct
  source 1..10: mol_type = other DNA
cacgactggt

SEQ ID NO: 1340 - DNA, 10 bp, synthetic construct
  source 1..10: mol_type = other DNA
tcgaacatca

SEQ ID NO: 1341 - DNA, 10 bp, synthetic construct
  source 1..10: mol_type = other DNA
cagcgtacaa

SEQ ID NO: 1342 - DNA, 10 bp, synthetic construct
  source 1..10: mol_type = other DNA
cataataatg

SEQ ID NO: 1343 - DNA, 10 bp, synthetic construct
  source 1..10: mol_type = other DNA
acgataattc

SEQ ID NO: 1344 - DNA, 10 bp, synthetic construct
  source 1..10: mol_type = other DNA
agactgtgag

SEQ ID NO: 1345 - DNA, 10 bp, synthetic construct
  source 1..10: mol_type = other DNA
ttgttgacgg

SEQ ID NO: 1346 - DNA, 10 bp, synthetic construct
  source 1..10: mol_type = other DNA
actcatgtgg

SEQ ID NO: 1347 - DNA, 10 bp, synthetic construct
  source 1..10: mol_type = other DNA
cggccattca

SEQ ID NO: 1348 - DNA, 10 bp, synthetic construct
  source 1..10: mol_type = other DNA
acctcattct

SEQ ID NO: 1349 - DNA, 10 bp, synthetic construct
  source 1..10: mol_type = other DNA
tccgcacagc

SEQ ID NO: 1350 - DNA, 10 bp, synthetic construct
  source 1..10: mol_type = other DNA
tcgccggagc

SEQ ID NO: 1351 - DNA, 10 bp, synthetic construct
  source 1..10: mol_type = other DNA
gagacaaccg

SEQ ID NO: 1352 - DNA, 10 bp, synthetic construct
  source 1..10: mol_type = other DNA
ggtaccttca

SEQ ID NO: 1353 - DNA, 10 bp, synthetic construct
  source 1..10: mol_type = other DNA
aacgcgataa

SEQ ID NO: 1354 - DNA, 10 bp, synthetic construct
  source 1..10: mol_type = other DNA
cattcaacat

SEQ ID NO: 1355 - DNA, 10 bp, synthetic construct
  source 1..10: mol_type = other DNA
tgagtgtata

SEQ ID NO: 1356 - DNA, 10 bp, synthetic construct
  source 1..10: mol_type = other DNA
cgcagtgaga

SEQ ID NO: 1357 - DNA, 10 bp, synthetic construct
  source 1..10: mol_type = other DNA
atatgacgcg

SEQ ID NO: 1358 - DNA, 10 bp, synthetic construct
  source 1..10: mol_type = other DNA
cactgctacc

SEQ ID NO: 1359 - DNA, 10 bp, synthetic construct
  source 1..10: mol_type = other DNA
agcttcagac

SEQ ID NO: 1360 - DNA, 10 bp, synthetic construct
  source 1..10: mol_type = other DNA
ggcttagcag

SEQ ID NO: 1361 - DNA, 10 bp, synthetic construct
  source 1..10: mol_type = other DNA
cgatcagagt

SEQ ID NO: 1362 - DNA, 10 bp, synthetic construct
  source 1..10: mol_type = other DNA
ctatcgctcc

SEQ ID NO: 1363 - DNA, 10 bp, synthetic construct
  source 1..10: mol_type = other DNA
acttccgcag

SEQ ID NO: 1364 - DNA, 10 bp, synthetic construct
  source 1..10: mol_type = other DNA
caacggtaac

SEQ ID NO: 1365 - DNA, 10 bp, synthetic construct
  source 1..10: mol_type = other DNA
accacttacc

SEQ ID NO: 1366 - DNA, 10 bp, synthetic construct
  source 1..10: mol_type = other DNA
cacagtatcc

SEQ ID NO: 1367 - DNA, 10 bp, synthetic construct
  source 1..10: mol_type = other DNA
taacggtcgc

SEQ ID NO: 1368 - DNA, 10 bp, synthetic construct
  source 1..10: mol_type = other DNA
ttgctcacag

SEQ ID NO: 1369 - DNA, 10 bp, synthetic construct
  source 1..10: mol_type = other DNA
acctacgcga

SEQ ID NO: 1370 - DNA, 10 bp, synthetic construct
  source 1..10: mol_type = other DNA
tccaattagt

SEQ ID NO: 1371 - DNA, 10 bp, synthetic construct
  source 1..10: mol_type = other DNA
agaattattc

SEQ ID NO: 1372 - DNA, 10 bp, synthetic construct
  source 1..10: mol_type = other DNA
cgaactgccg

SEQ ID NO: 1373 - DNA, 10 bp, synthetic construct
  source 1..10: mol_type = other DNA
ttgttgcgcc

SEQ ID NO: 1374 - DNA, 10 bp, synthetic construct
  source 1..10: mol_type = other DNA
atgcaacctt

SEQ ID NO: 1375 - DNA, 10 bp, synthetic construct
  source 1..10: mol_type = other DNA
cctatcggta

SEQ ID NO: 1376 - DNA, 10 bp, synthetic construct
  source 1..10: mol_type = other DNA
aatagtcgat

SEQ ID NO: 1377 - DNA, 10 bp, synthetic construct
  source 1..10: mol_type = other DNA
gagcaatgat

SEQ ID NO: 1378 - DNA, 10 bp, synthetic construct
  source 1..10: mol_type = other DNA
acagctcaga

SEQ ID NO: 1379 - DNA, 10 bp, synthetic construct
  source 1..10: mol_type = other DNA
ccacgcttgt

SEQ ID NO: 1380 - DNA, 10 bp, synthetic construct
  source 1..10: mol_type = other DNA
aagcctggca

SEQ ID NO: 1381 - DNA, 10 bp, synthetic construct
  source 1..10: mol_type = other DNA
caggacagtg

SEQ ID NO: 1382 - DNA, 10 bp, synthetic construct
  source 1..10: mol_type = other DNA
tcaagttatt

SEQ ID NO: 1383 - DNA, 10 bp, synthetic construct
  source 1..10: mol_type = other DNA
ccacacaatt

SEQ ID NO: 1384 - DNA, 10 bp, synthetic construct
  source 1..10: mol_type = other DNA
agaagattgc

SEQ ID NO: 1385 - DNA, 10 bp, synthetic construct
  source 1..10: mol_type = other DNA
aagacggtcc

SEQ ID NO: 1386 - DNA, 10 bp, synthetic construct
  source 1..10: mol_type = other DNA
actgagtgct

SEQ ID NO: 1387 - DNA, 10 bp, synthetic construct
  source 1..10: mol_type = other DNA
agacgcgaga

SEQ ID NO: 1388 - DNA, 10 bp, synthetic construct
  source 1..10: mol_type = other DNA
taacttggag

SEQ ID NO: 1389 - DNA, 10 bp, synthetic construct
  source 1..10: mol_type = other DNA
tccggtacga

SEQ ID NO: 1390 - DNA, 10 bp, synthetic construct
  source 1..10: mol_type = other DNA
ttagtaatct

SEQ ID NO: 1391 - DNA, 10 bp, synthetic construct
  source 1..10: mol_type = other DNA
ccggccagta

SEQ ID NO: 1392 - DNA, 10 bp, synthetic construct
  source 1..10: mol_type = other DNA
gtcgctaatc

SEQ ID NO: 1393 - DNA, 10 bp, synthetic construct
  source 1..10: mol_type = other DNA
agatatcgac

SEQ ID NO: 1394 - DNA, 10 bp, synthetic construct
  source 1..10: mol_type = other DNA
cctcaatagt

SEQ ID NO: 1395 - DNA, 10 bp, synthetic construct
  source 1..10: mol_type = other DNA
acggttcact

SEQ ID NO: 1396 - DNA, 10 bp, synthetic construct
  source 1..10: mol_type = other DNA
tatgacattc

SEQ ID NO: 1397 - DNA, 10 bp, synthetic construct
  source 1..10: mol_type = other DNA
atcacaaccg

SEQ ID NO: 1398 - DNA, 10 bp, synthetic construct
  source 1..10: mol_type = other DNA
taactcggcc

SEQ ID NO: 1399 - DNA, 10 bp, synthetic construct
  source 1..10: mol_type = other DNA
taacgatctt

SEQ ID NO: 1400 - DNA, 10 bp, synthetic construct
  source 1..10: mol_type = other DNA
acgagaacct

SEQ ID NO: 1401 - DNA, 10 bp, synthetic construct
  source 1..10: mol_type = other DNA
cagccatcta

SEQ ID NO: 1402 - DNA, 10 bp, synthetic construct
  source 1..10: mol_type = other DNA
atggcaatta

SEQ ID NO: 1403 - DNA, 10 bp, synthetic construct
  source 1..10: mol_type = other DNA
agcacctctc

SEQ ID NO: 1404 - DNA, 10 bp, synthetic construct
  source 1..10: mol_type = other DNA
ttctattcgg

SEQ ID NO: 1405 - DNA, 10 bp, synthetic construct
  source 1..10: mol_type = other DNA
ggcaagcacg

SEQ ID NO: 1406 - DNA, 10 bp, synthetic construct
  source 1..10: mol_type = other DNA
tggtaacagc

SEQ ID NO: 1407 - DNA, 10 bp, synthetic construct
  source 1..10: mol_type = other DNA
atactaatca

SEQ ID NO: 1408 - DNA, 10 bp, synthetic construct
  source 1..10: mol_type = other DNA
aacgaatctg

SEQ ID NO: 1409 - DNA, 10 bp, synthetic construct
  source 1..10: mol_type = other DNA
ggacaacgct

SEQ ID NO: 1410 - DNA, 10 bp, synthetic construct
  source 1..10: mol_type = other DNA
tattactatc

SEQ ID NO: 1411 - DNA, 10 bp, synthetic construct
  source 1..10: mol_type = other DNA
acagcaggat

SEQ ID NO: 1412 - DNA, 10 bp, synthetic construct
  source 1..10: mol_type = other DNA
tactcattcc

SEQ ID NO: 1413 - DNA, 10 bp, synthetic construct
  source 1..10: mol_type = other DNA
ttagttgcgt

SEQ ID NO: 1414 - DNA, 10 bp, synthetic construct
  source 1..10: mol_type = other DNA
ggaagtcata

SEQ ID NO: 1415 - DNA, 10 bp, synthetic construct
  source 1..10: mol_type = other DNA
attcattggc

SEQ ID NO: 1416 - DNA, 10 bp, synthetic construct
  source 1..10: mol_type = other DNA
accaggtaag

SEQ ID NO: 1417 - DNA, 10 bp, synthetic construct
  source 1..10: mol_type = other DNA
agtagacaac

SEQ ID NO: 1418 - DNA, 10 bp, synthetic construct
  source 1..10: mol_type = other DNA
catccggttc

SEQ ID NO: 1419 - DNA, 10 bp, synthetic construct
  source 1..10: mol_type = other DNA
ctccatatta

SEQ ID NO: 1420 - DNA, 10 bp, synthetic construct
  source 1..10: mol_type = other DNA
ttagagaaga

SEQ ID NO: 1421 - DNA, 10 bp, synthetic construct
  source 1..10: mol_type = other DNA
ttatccgtaa

SEQ ID NO: 1422 - DNA, 10 bp, synthetic construct
  source 1..10: mol_type = other DNA
acgctaatat

SEQ ID NO: 1423 - DNA, 10 bp, synthetic construct
  source 1..10: mol_type = other DNA
aatacgttgt

SEQ ID NO: 1424 - DNA, 10 bp, synthetic construct
  source 1..10: mol_type = other DNA
tcggctgatg

SEQ ID NO: 1425 - DNA, 10 bp, synthetic construct
  source 1..10: mol_type = other DNA
ttgtactagg

SEQ ID NO: 1426 - DNA, 10 bp, synthetic construct
  source 1..10: mol_type = other DNA
agttaaggtc

SEQ ID NO: 1427 - DNA, 10 bp, synthetic construct
  source 1..10: mol_type = other DNA
cttccaggca

SEQ ID NO: 1428 - DNA, 10 bp, synthetic construct
  source 1..10: mol_type = other DNA
ccgaataggc

SEQ ID NO: 1429 - DNA, 10 bp, synthetic construct
  source 1..10: mol_type = other DNA
accttggtaa

SEQ ID NO: 1430 - DNA, 10 bp, synthetic construct
  source 1..10: mol_type = other DNA
tgatcctact

SEQ ID NO: 1431 - DNA, 10 bp, synthetic construct
  source 1..10: mol_type = other DNA
tggaacgctc

SEQ ID NO: 1432 - DNA, 10 bp, synthetic construct
  source 1..10: mol_type = other DNA
ccgttcaccg

SEQ ID NO: 1433 - DNA, 10 bp, synthetic construct
  source 1..10: mol_type = other DNA
acagtcattg

SEQ ID NO: 1434 - DNA, 10 bp, synthetic construct
  source 1..10: mol_type = other DNA
tcaccattct

SEQ ID NO: 1435 - DNA, 10 bp, synthetic construct
  source 1..10: mol_type = other DNA
ggttccactt

SEQ ID NO: 1436 - DNA, 10 bp, synthetic construct
  source 1..10: mol_type = other DNA
tcctgtgccg

SEQ ID NO: 1437 - DNA, 10 bp, synthetic construct
  source 1..10: mol_type = other DNA
tgttgtgcat

SEQ ID NO: 1438 - DNA, 10 bp, synthetic construct
  source 1..10: mol_type = other DNA
tgagctataa

SEQ ID NO: 1439 - DNA, 10 bp, synthetic construct
  source 1..10: mol_type = other DNA
agttgccggt

SEQ ID NO: 1440 - DNA, 10 bp, synthetic construct
  source 1..10: mol_type = other DNA
gagatcacgg

SEQ ID NO: 1441 - DNA, 10 bp, synthetic construct
  source 1..10: mol_type = other DNA
acggccatag

SEQ ID NO: 1442 - DNA, 10 bp, synthetic construct
  source 1..10: mol_type = other DNA
ctcctcagta

SEQ ID NO: 1443 - DNA, 10 bp, synthetic construct
  source 1..10: mol_type = other DNA
cgccgcagag

SEQ ID NO: 1444 - DNA, 10 bp, synthetic construct
  source 1..10: mol_type = other DNA
ttgtaacatt

SEQ ID NO: 1445 - DNA, 10 bp, synthetic construct
  source 1..10: mol_type = other DNA
ctagtgtacc

SEQ ID NO: 1446 - DNA, 10 bp, synthetic construct
  source 1..10: mol_type = other DNA
ttatcgctag

SEQ ID NO: 1447 - DNA, 10 bp, synthetic construct
  source 1..10: mol_type = other DNA
gatcagtata

SEQ ID NO: 1448 - DNA, 10 bp, synthetic construct
  source 1..10: mol_type = other DNA
tggccatacc

SEQ ID NO: 1449 - DNA, 10 bp, synthetic construct
  source 1..10: mol_type = other DNA
tattcctcac

SEQ ID NO: 1450 - DNA, 10 bp, synthetic construct
  source 1..10: mol_type = other DNA
tgagatgtga

SEQ ID NO: 1451 - DNA, 10 bp, synthetic construct
  source 1..10: mol_type = other DNA
ggcgcaacaa

SEQ ID NO: 1452 - DNA, 10 bp, synthetic construct
  source 1..10: mol_type = other DNA
ccatgatcga

SEQ ID NO: 1453 - DNA, 10 bp, synthetic construct
  source 1..10: mol_type = other DNA
ctctacctgc

SEQ ID NO: 1454 - DNA, 10 bp, synthetic construct
  source 1..10: mol_type = other DNA
tcatctggca

SEQ ID NO: 1455 - DNA, 10 bp, synthetic construct
  source 1..10: mol_type = other DNA
gtcgctgcct

SEQ ID NO: 1456 - DNA, 10 bp, synthetic construct
  source 1..10: mol_type = other DNA
taaccaccga

SEQ ID NO: 1457 - DNA, 10 bp, synthetic construct
  source 1..10: mol_type = other DNA
ggaccgcaca

SEQ ID NO: 1458 - DNA, 10 bp, synthetic construct
  source 1..10: mol_type = other DNA
ccacgtaaca

SEQ ID NO: 1459 - DNA, 10 bp, synthetic construct
  source 1..10: mol_type = other DNA
agtaagaaga

SEQ ID NO: 1460 - DNA, 10 bp, synthetic construct
  source 1..10: mol_type = other DNA
aacagcatgg

SEQ ID NO: 1461 - DNA, 10 bp, synthetic construct
  source 1..10: mol_type = other DNA
taagcgagca

SEQ ID NO: 1462 - DNA, 10 bp, synthetic construct
  source 1..10: mol_type = other DNA
tagcgagaac

SEQ ID NO: 1463 - DNA, 10 bp, synthetic construct
  source 1..10: mol_type = other DNA
gatcacctag

SEQ ID NO: 1464 - DNA, 10 bp, synthetic construct
  source 1..10: mol_type = other DNA
tgcacacacc

SEQ ID NO: 1465 - DNA, 10 bp, synthetic construct
  source 1..10: mol_type = other DNA
tggatccgaa

SEQ ID NO: 1466 - DNA, 10 bp, synthetic construct
  source 1..10: mol_type = other DNA
agagacctgc

SEQ ID NO: 1467 - DNA, 10 bp, synthetic construct
  source 1..10: mol_type = other DNA
catattacga

SEQ ID NO: 1468 - DNA, 10 bp, synthetic construct
  source 1..10: mol_type = other DNA
ccgactacag

SEQ ID NO: 1469 - DNA, 10 bp, synthetic construct
  source 1..10: mol_type = other DNA
ttcggctgag

SEQ ID NO: 1470 - DNA, 10 bp, synthetic construct
  source 1..10: mol_type = other DNA
acggacagct

SEQ ID NO: 1471 - DNA, 10 bp, synthetic construct
  source 1..10: mol_type = other DNA
acctagtcct

SEQ ID NO: 1472 - DNA, 10 bp, synthetic construct
  source 1..10: mol_type = other DNA
ggagcagaga

SEQ ID NO: 1473 - DNA, 10 bp, synthetic construct
  source 1..10: mol_type = other DNA
tgtcaatagc

SEQ ID NO: 1474 - DNA, 10 bp, synthetic construct
  source 1..10: mol_type = other DNA
cgcaatgcta

SEQ ID NO: 1475 - DNA, 10 bp, synthetic construct
  source 1..10: mol_type = other DNA
agccactggc

SEQ ID NO: 1476 - DNA, 10 bp, synthetic construct
  source 1..10: mol_type = other DNA
aattccaatg

SEQ ID NO: 1477 - DNA, 10 bp, synthetic construct
  source 1..10: mol_type = other DNA
tcgccgtcca

SEQ ID NO: 1478 - DNA, 10 bp, synthetic construct
  source 1..10: mol_type = other DNA
cgacatgaag

SEQ ID NO: 1479 - DNA, 10 bp, synthetic construct
  source 1..10: mol_type = other DNA
agtcatgcag

SEQ ID NO: 1480 - DNA, 10 bp, synthetic construct
  source 1..10: mol_type = other DNA
ggcagctgta

SEQ ID NO: 1481 - DNA, 10 bp, synthetic construct
  source 1..10: mol_type = other DNA
accgcagatg

SEQ ID NO: 1482 - DNA, 10 bp, synthetic construct
  source 1..10: mol_type = other DNA
caatcgcaca

SEQ ID NO: 1483 - DNA, 10 bp, synthetic construct
  source 1..10: mol_type = other DNA
ttgacgcttc

SEQ ID NO: 1484 - DNA, 10 bp, synthetic construct
  source 1..10: mol_type = other DNA
attggtggtt

SEQ ID NO: 1485 - DNA, 10 bp, synthetic construct
  source 1..10: mol_type = other DNA
caacgaagat

SEQ ID NO: 1486 - DNA, 10 bp, synthetic construct
  source 1..10: mol_type = other DNA
agtattgctt

SEQ ID NO: 1487 - DNA, 10 bp, synthetic construct
  source 1..10: mol_type = other DNA
gtaagtatga

SEQ ID NO: 1488 - DNA, 10 bp, synthetic construct
  source 1..10: mol_type = other DNA
atatgtatca

SEQ ID NO: 1489 - DNA, 10 bp, synthetic construct
  source 1..10: mol_type = other DNA
catcaagtac

SEQ ID NO: 1490 - DNA, 10 bp, synthetic construct
  source 1..10: mol_type = other DNA
tcgatagcat

SEQ ID NO: 1491 - DNA, 10 bp, synthetic construct
  source 1..10: mol_type = other DNA
gaatcattga

SEQ ID NO: 1492 - DNA, 10 bp, synthetic construct
  source 1..10: mol_type = other DNA
cttggttgga

SEQ ID NO: 1493 - DNA, 10 bp, synthetic construct
  source 1..10: mol_type = other DNA
acggttatgg

SEQ ID NO: 1494 - DNA, 10 bp, synthetic construct
  source 1..10: mol_type = other DNA
ccgtcgcata

SEQ ID NO: 1495 - DNA, 10 bp, synthetic construct
  source 1..10: mol_type = other DNA
gcacacgacc

SEQ ID NO: 1496 - DNA, 10 bp, synthetic construct
  source 1..10: mol_type = other DNA
acctattcaa

SEQ ID NO: 1497 - DNA, 10 bp, synthetic construct
  source 1..10: mol_type = other DNA
tagagatgag

SEQ ID NO: 1498 - DNA, 10 bp, synthetic construct
  source 1..10: mol_type = other DNA
ctcacgatag

SEQ ID NO: 1499 - DNA, 10 bp, synthetic construct
  source 1..10: mol_type = other DNA
agacgagatt

SEQ ID NO: 1500 - DNA, 10 bp, synthetic construct
  source 1..10: mol_type = other DNA
aactccaccg

SEQ ID NO: 1501 - DNA, 10 bp, synthetic construct
  source 1..10: mol_type = other DNA
cggcagcctc

SEQ ID NO: 1502 - DNA, 10 bp, synthetic construct
  source 1..10: mol_type = other DNA
accacagagt

SEQ ID NO: 1503 - DNA, 10 bp, synthetic construct
  source 1..10: mol_type = other DNA
actaggacga

SEQ ID NO: 1504 - DNA, 10 bp, synthetic construct
  source 1..10: mol_type = other DNA
cctacgttcc

SEQ ID NO: 1505 - DNA, 10 bp, synthetic construct
  source 1..10: mol_type = other DNA
tattcttccg

SEQ ID NO: 1506 - DNA, 10 bp, synthetic construct
  source 1..10: mol_type = other DNA
cctcctctgg

SEQ ID NO: 1507 - DNA, 10 bp, synthetic construct
  source 1..10: mol_type = other DNA
cggacgtatg

SEQ ID NO: 1508 - DNA, 10 bp, synthetic construct
  source 1..10: mol_type = other DNA
ggaacgtaga

SEQ ID NO: 1509 - DNA, 10 bp, synthetic construct
  source 1..10: mol_type = other DNA
attggtatgt

SEQ ID NO: 1510 - DNA, 10 bp, synthetic construct
  source 1..10: mol_type = other DNA
tccgcttaat

SEQ ID NO: 1511 - DNA, 10 bp, synthetic construct
  source 1..10: mol_type = other DNA
tgcaatgcat

SEQ ID NO: 1512 - DNA, 10 bp, synthetic construct
  source 1..10: mol_type = other DNA
ctggcagcgc

SEQ ID NO: 1513 - DNA, 10 bp, synthetic construct
  source 1..10: mol_type = other DNA
ttccgcatag

SEQ ID NO: 1514 - DNA, 10 bp, synthetic construct
  source 1..10: mol_type = other DNA
aactacagca

SEQ ID NO: 1515 - DNA, 10 bp, synthetic construct
  source 1..10: mol_type = other DNA
gacctgacca

SEQ ID NO: 1516 - DNA, 10 bp, synthetic construct
  source 1..10: mol_type = other DNA
gacagattaa

SEQ ID NO: 1517 - DNA, 10 bp, synthetic construct
  source 1..10: mol_type = other DNA
atcctcctga

SEQ ID NO: 1518 - DNA, 10 bp, synthetic construct
  source 1..10: mol_type = other DNA
aatccaatct

SEQ ID NO: 1519 - DNA, 10 bp, synthetic construct
  source 1..10: mol_type = other DNA
accggctact

SEQ ID NO: 1520 - DNA, 10 bp, synthetic construct
  source 1..10: mol_type = other DNA
attggctaga

SEQ ID NO: 1521 - DNA, 10 bp, synthetic construct
  source 1..10: mol_type = other DNA
aatgagattg

SEQ ID NO: 1522 - DNA, 10 bp, synthetic construct
  source 1..10: mol_type = other DNA
actcctgatg

SEQ ID NO: 1523 - DNA, 10 bp, synthetic construct
  source 1..10: mol_type = other DNA
atcataatga

SEQ ID NO: 1524 - DNA, 10 bp, synthetic construct
  source 1..10: mol_type = other DNA
ctcctgttcg

SEQ ID NO: 1525 - DNA, 10 bp, synthetic construct
  source 1..10: mol_type = other DNA
catgcctggc

SEQ ID NO: 1526 - DNA, 10 bp, synthetic construct
  source 1..10: mol_type = other DNA
ataagttcac

SEQ ID NO: 1527 - DNA, 10 bp, synthetic construct
  source 1..10: mol_type = other DNA
ttaagacacc

SEQ ID NO: 1528 - DNA, 10 bp, synthetic construct
  source 1..10: mol_type = other DNA
cggcacagac

SEQ ID NO: 1529 - DNA, 10 bp, synthetic construct
  source 1..10: mol_type = other DNA
tcatgcaacg

SEQ ID NO: 1530 - DNA, 10 bp, synthetic construct
  source 1..10: mol_type = other DNA
atccgattag

SEQ ID NO: 1531 - DNA, 10 bp, synthetic construct
  source 1..10: mol_type = other DNA
caacatccga

SEQ ID NO: 1532 - DNA, 10 bp, synthetic construct
  source 1..10: mol_type = other DNA
atcctattct

SEQ ID NO: 1533 - DNA, 10 bp, synthetic construct
  source 1..10: mol_type = other DNA
tgtcgaagtt

SEQ ID NO: 1534 - DNA, 10 bp, synthetic construct
  source 1..10: mol_type = other DNA
accaagaccg

SEQ ID NO: 1535 - DNA, 10 bp, synthetic construct
  source 1..10: mol_type = other DNA
tcggcacctg

SEQ ID NO: 1536 - DNA, 10 bp, synthetic construct
  source 1..10: mol_type = other DNA
ctcgaagcct

SEQ ID NO: 1537 - DNA, 10 bp, synthetic construct
  source 1..10: mol_type = other DNA
catagttagg

SEQ ID NO: 1538 - DNA, 10 bp, synthetic construct
  source 1..10: mol_type = other DNA
ggttgtacta

SEQ ID NO: 1539 - DNA, 10 bp, synthetic construct
  source 1..10: mol_type = other DNA
ttaggagccg

SEQ ID NO: 1540 - DNA, 10 bp, synthetic construct
  source 1..10: mol_type = other DNA
aatggcatgc

SEQ ID NO: 1541 - DNA, 10 bp, synthetic construct
  source 1..10: mol_type = other DNA
tgatgattcc

SEQ ID NO: 1542 - DNA, 10 bp, synthetic construct
  source 1..10: mol_type = other DNA
tatagccgca

SEQ ID NO: 1543 - DNA, 10 bp, synthetic construct
  source 1..10: mol_type = other DNA
attaagtacc

SEQ ID NO: 1544 - DNA, 10 bp, synthetic construct
  source 1..10: mol_type = other DNA
cactattgat

SEQ ID NO: 1545 - DNA, 10 bp, synthetic construct
  source 1..10: mol_type = other DNA
agagccttga

SEQ ID NO: 1546 - DNA, 10 bp, synthetic construct
  source 1..10: mol_type = other DNA
ggcggcggtt

SEQ ID NO: 1547 - DNA, 10 bp, synthetic construct
  source 1..10: mol_type = other DNA
gtatccttcg

SEQ ID NO: 1548 - DNA, 10 bp, synthetic construct
  source 1..10: mol_type = other DNA
gtgccgctaa

SEQ ID NO: 1549 - DNA, 10 bp, synthetic construct
  source 1..10: mol_type = other DNA
attacgaagg

SEQ ID NO: 1550 - DNA, 10 bp, synthetic construct
  source 1..10: mol_type = other DNA
aactgattga

SEQ ID NO: 1551 - DNA, 10 bp, synthetic construct
  source 1..10: mol_type = other DNA
atagcttcca

SEQ ID NO: 1552 - DNA, 10 bp, synthetic construct
  source 1..10: mol_type = other DNA
tgtatcatca

SEQ ID NO: 1553 - DNA, 10 bp, synthetic construct
  source 1..10: mol_type = other DNA
taaccattgg

SEQ ID NO: 1554 - DNA, 10 bp, synthetic construct
  source 1..10: mol_type = other DNA
taatagctgc

SEQ ID NO: 1555 - DNA, 10 bp, synthetic construct
  source 1..10: mol_type = other DNA
gacaatggca

SEQ ID NO: 1556 - DNA, 10 bp, synthetic construct
  source 1..10: mol_type = other DNA
ctcatccgtt

SEQ ID NO: 1557 - DNA, 10 bp, synthetic construct
  source 1..10: mol_type = other DNA
ctctcagcgg

SEQ ID NO: 1558 - DNA, 10 bp, synthetic construct
  source 1..10: mol_type = other DNA
acatatcatg

SEQ ID NO: 1559 - DNA, 10 bp, synthetic construct
  source 1..10: mol_type = other DNA
gccaatcgac

SEQ ID NO: 1560 - DNA, 10 bp, synthetic construct
  source 1..10: mol_type = other DNA
gcctacggtg

SEQ ID NO: 1561 - DNA, 10 bp, synthetic construct
  source 1..10: mol_type = other DNA
ccgatcatag

SEQ ID NO: 1562 - DNA, 10 bp, synthetic construct
  source 1..10: mol_type = other DNA
attactagac

SEQ ID NO: 1563 - DNA, 10 bp, synthetic construct
  source 1..10: mol_type = other DNA
cggagaagtg

SEQ ID NO: 1564 - DNA, 10 bp, synthetic construct
  source 1..10: mol_type = other DNA
tcgctgagtg

SEQ ID NO: 1565 - DNA, 10 bp, synthetic construct
  source 1..10: mol_type = other DNA
ggaatactct

SEQ ID NO: 1566 - DNA, 10 bp, synthetic construct
  source 1..10: mol_type = other DNA
gcattggtca

SEQ ID NO: 1567 - DNA, 10 bp, synthetic construct
  source 1..10: mol_type = other DNA
atcgcctgat

SEQ ID NO: 1568 - DNA, 10 bp, synthetic construct
  source 1..10: mol_type = other DNA
attcaagcac

SEQ ID NO: 1569 - DNA, 10 bp, synthetic construct
  source 1..10: mol_type = other DNA
ggcggcaagc

SEQ ID NO: 1570 - DNA, 10 bp, synthetic construct
  source 1..10: mol_type = other DNA
tatagaatgt

SEQ ID NO: 1571 - DNA, 10 bp, synthetic construct
  source 1..10: mol_type = other DNA
ccacagcgac

SEQ ID NO: 1572 - DNA, 10 bp, synthetic construct
  source 1..10: mol_type = other DNA
tacgaatgca

SEQ ID NO: 1573 - DNA, 10 bp, synthetic construct
  source 1..10: mol_type = other DNA
agccatcata

SEQ ID NO: 1574 - DNA, 10 bp, synthetic construct
  source 1..10: mol_type = other DNA
agctgactgc

SEQ ID NO: 1575 - DNA, 10 bp, synthetic construct
  source 1..10: mol_type = other DNA
ggtggacctg

SEQ ID NO: 1576 - DNA, 10 bp, synthetic construct
  source 1..10: mol_type = other DNA
ggcttaacca

SEQ ID NO: 1577 - DNA, 10 bp, synthetic construct
  source 1..10: mol_type = other DNA
ggagcctaat

SEQ ID NO: 1578 - DNA, 10 bp, synthetic construct
  source 1..10: mol_type = other DNA
acaagagcag

SEQ ID NO: 1579 - DNA, 10 bp, synthetic construct
  source 1..10: mol_type = other DNA
cgcctatgaa

SEQ ID NO: 1580 - DNA, 10 bp, synthetic construct
  source 1..10: mol_type = other DNA
ggtcgctaat

SEQ ID NO: 1581 - DNA, 10 bp, synthetic construct
  source 1..10: mol_type = other DNA
ctctatcacg

SEQ ID NO: 1582 - DNA, 10 bp, synthetic construct
  source 1..10: mol_type = other DNA
gacatgacac

SEQ ID NO: 1583 - DNA, 10 bp, synthetic construct
  source 1..10: mol_type = other DNA
tctaagtaag

SEQ ID NO: 1584 - DNA, 10 bp, synthetic construct
  source 1..10: mol_type = other DNA
ttgtgcttag

SEQ ID NO: 1585 - DNA, 10 bp, synthetic construct
  source 1..10: mol_type = other DNA
ttctagtgcc

SEQ ID NO: 1586 - DNA, 10 bp, synthetic construct
  source 1..10: mol_type = other DNA
acttaggact

SEQ ID NO: 1587 - DNA, 10 bp, synthetic construct
  source 1..10: mol_type = other DNA
taagccatct

SEQ ID NO: 1588 - DNA, 10 bp, synthetic construct
  source 1..10: mol_type = other DNA
ctagacttct

SEQ ID NO: 1589 - DNA, 10 bp, synthetic construct
  source 1..10: mol_type = other DNA
agtatctatt

SEQ ID NO: 1590 - DNA, 10 bp, synthetic construct
  source 1..10: mol_type = other DNA
ctggttgtaa

SEQ ID NO: 1591 - DNA, 10 bp, synthetic construct
  source 1..10: mol_type = other DNA
ccgcagacct

SEQ ID NO: 1592 - DNA, 10 bp, synthetic construct
  source 1..10: mol_type = other DNA
ccgcaccaac

SEQ ID NO: 1593 - DNA, 10 bp, synthetic construct
  source 1..10: mol_type = other DNA
agttggcagc

SEQ ID NO: 1594 - DNA, 10 bp, synthetic construct
  source 1..10: mol_type = other DNA
ttcggctcct

SEQ ID NO: 1595 - DNA, 10 bp, synthetic construct
  source 1..10: mol_type = other DNA
caatgtatgg

SEQ ID NO: 1596 - DNA, 10 bp, synthetic construct
  source 1..10: mol_type = other DNA
caactatata

SEQ ID NO: 1597 - DNA, 10 bp, synthetic construct
  source 1..10: mol_type = other DNA
ccacttgtgc

SEQ ID NO: 1598 - DNA, 10 bp, synthetic construct
  source 1..10: mol_type = other DNA
caaggcgact

SEQ ID NO: 1599 - DNA, 10 bp, synthetic construct
  source 1..10: mol_type = other DNA
gcaacctgca

SEQ ID NO: 1600 - DNA, 10 bp, synthetic construct
  source 1..10: mol_type = other DNA
gcagccgcgc

SEQ ID NO: 1601 - DNA, 10 bp, synthetic construct
  source 1..10: mol_type = other DNA
attgtgcctg

SEQ ID NO: 1602 - DNA, 10 bp, synthetic construct
  source 1..10: mol_type = other DNA
tccatgagag

SEQ ID NO: 1603 - DNA, 10 bp, synthetic construct
  source 1..10: mol_type = other DNA
attgattagg

SEQ ID NO: 1604 - DNA, 10 bp, synthetic construct
  source 1..10: mol_type = other DNA
cgccatgatt

SEQ ID NO: 1605 - DNA, 10 bp, synthetic construct
  source 1..10: mol_type = other DNA
acggattaag

SEQ ID NO: 1606 - DNA, 10 bp, synthetic construct
  source 1..10: mol_type = other DNA
gtagaagttg

SEQ ID NO: 1607 - DNA, 10 bp, synthetic construct
  source 1..10: mol_type = other DNA
aaggttccgc

SEQ ID NO: 1608 - DNA, 10 bp, synthetic construct
  source 1..10: mol_type = other DNA
cgctcagcct

SEQ ID NO: 1609 - DNA, 10 bp, synthetic construct
  source 1..10: mol_type = other DNA
tcacatgtaa

SEQ ID NO: 1610 - DNA, 10 bp, synthetic construct
  source 1..10: mol_type = other DNA
gagatcctga

SEQ ID NO: 1611 - DNA, 10 bp, synthetic construct
  source 1..10: mol_type = other DNA
gttgtattat

SEQ ID NO: 1612 - DNA, 10 bp, synthetic construct
  source 1..10: mol_type = other DNA
ggacctatcc

SEQ ID NO: 1613 - DNA, 10 bp, synthetic construct
  source 1..10: mol_type = other DNA
aacctcgtaa

SEQ ID NO: 1614 - DNA, 10 bp, synthetic construct
  source 1..10: mol_type = other DNA
cgcagctact

SEQ ID NO: 1615 - DNA, 10 bp, synthetic construct
  source 1..10: mol_type = other DNA
catcttcatt

SEQ ID NO: 1616 - DNA, 10 bp, synthetic construct
  source 1..10: mol_type = other DNA
gtggtcctcg

SEQ ID NO: 1617 - DNA, 10 bp, synthetic construct
  source 1..10: mol_type = other DNA
aagaatgtag

SEQ ID NO: 1618 - DNA, 10 bp, synthetic construct
  source 1..10: mol_type = other DNA
acgacttgtt

SEQ ID NO: 1619 - DNA, 10 bp, synthetic construct
  source 1..10: mol_type = other DNA
tcaatagctc

SEQ ID NO: 1620 - DNA, 10 bp, synthetic construct
  source 1..10: mol_type = other DNA
gtggcattct

SEQ ID NO: 1621 - DNA, 10 bp, synthetic construct
  source 1..10: mol_type = other DNA
cagcatctgc

SEQ ID NO: 1622 - DNA, 10 bp, synthetic construct
  source 1..10: mol_type = other DNA
ggtagaggtc

SEQ ID NO: 1623 - DNA, 10 bp, synthetic construct
  source 1..10: mol_type = other DNA
cggactagct

SEQ ID NO: 1624 - DNA, 10 bp, synthetic construct
  source 1..10: mol_type = other DNA
actatctcta

SEQ ID NO: 1625 - DNA, 10 bp, synthetic construct
  source 1..10: mol_type = other DNA
attcgcattg

SEQ ID NO: 1626 - DNA, 10 bp, synthetic construct
  source 1..10: mol_type = other DNA
gacttccagg

SEQ ID NO: 1627 - DNA, 10 bp, synthetic construct
  source 1..10: mol_type = other DNA
ggcttgtaag

SEQ ID NO: 1628 - DNA, 10 bp, synthetic construct
  source 1..10: mol_type = other DNA
gttcacgatt

SEQ ID NO: 1629 - DNA, 10 bp, synthetic construct
  source 1..10: mol_type = other DNA
ggttgacatt

SEQ ID NO: 1630 - DNA, 10 bp, synthetic construct
  source 1..10: mol_type = other DNA
gaatcgtagc

SEQ ID NO: 1631 - DNA, 10 bp, synthetic construct
  source 1..10: mol_type = other DNA
tgatgccgcc

SEQ ID NO: 1632 - DNA, 10 bp, synthetic construct
  source 1..10: mol_type = other DNA
taccaactgc

SEQ ID NO: 1633 - DNA, 10 bp, synthetic construct
  source 1..10: mol_type = other DNA
catagccgtc

SEQ ID NO: 1634 - DNA, 10 bp, synthetic construct
  source 1..10: mol_type = other DNA
gtggcctcgc

SEQ ID NO: 1635 - DNA, 10 bp, synthetic construct
  source 1..10: mol_type = other DNA
gtcattggat

SEQ ID NO: 1636 - DNA, 10 bp, synthetic construct
  source 1..10: mol_type = other DNA
tcagaggtag

SEQ ID NO: 1637 - DNA, 10 bp, synthetic construct
  source 1..10: mol_type = other DNA
gttaccgtcc

SEQ ID NO: 1638 - DNA, 10 bp, synthetic construct
  source 1..10: mol_type = other DNA
cggtagacgc

SEQ ID NO: 1639 - DNA, 10 bp, synthetic construct
  source 1..10: mol_type = other DNA
attcggagac

SEQ ID NO: 1640 - DNA, 10 bp, synthetic construct
  source 1..10: mol_type = other DNA
tggacaagcg

SEQ ID NO: 1641 - DNA, 10 bp, synthetic construct
  source 1..10: mol_type = other DNA
atagcaatgg

SEQ ID NO: 1642 - DNA, 10 bp, synthetic construct
  source 1..10: mol_type = other DNA
tcgctgttag

SEQ ID NO: 1643 - DNA, 10 bp, synthetic construct
  source 1..10: mol_type = other DNA
ctctagccgt

SEQ ID NO: 1644 - DNA, 10 bp, synthetic construct
  source 1..10: mol_type = other DNA
gtcatcgctt

SEQ ID NO: 1645 - DNA, 10 bp, synthetic construct
  source 1..10: mol_type = other DNA
ccaagtctgc

SEQ ID NO: 1646 - DNA, 10 bp, synthetic construct
  source 1..10: mol_type = other DNA
tctcaccgca

SEQ ID NO: 1647 - DNA, 10 bp, synthetic construct
  source 1..10: mol_type = other DNA
accgatccat

SEQ ID NO: 1648 - DNA, 10 bp, synthetic construct
  source 1..10: mol_type = other DNA
ggccttcagc

SEQ ID NO: 1649 - DNA, 10 bp, synthetic construct
  source 1..10: mol_type = other DNA
tgtgaacgat

SEQ ID NO: 1650 - DNA, 10 bp, synthetic construct
  source 1..10: mol_type = other DNA
ataccgtatg

SEQ ID NO: 1651 - DNA, 10 bp, synthetic construct
  source 1..10: mol_type = other DNA
tggagtggtg

SEQ ID NO: 1652 - DNA, 10 bp, synthetic construct
  source 1..10: mol_type = other DNA
gaactatcac

SEQ ID NO: 1653 - DNA, 10 bp, synthetic construct
  source 1..10: mol_type = other DNA
tacacttgtc

SEQ ID NO: 1654 - DNA, 10 bp, synthetic construct
  source 1..10: mol_type = other DNA
tcatctatcc

SEQ ID NO: 1655 - DNA, 10 bp, synthetic construct
  source 1..10: mol_type = other DNA
attaatatct

SEQ ID NO: 1656 - DNA, 10 bp, synthetic construct
  source 1..10: mol_type = other DNA
caatgcttaa

SEQ ID NO: 1657 - DNA, 10 bp, synthetic construct
  source 1..10: mol_type = other DNA
tcacattcta

SEQ ID NO: 1658 - DNA, 10 bp, synthetic construct
  source 1..10: mol_type = other DNA
ttccagcaac

SEQ ID NO: 1659 - DNA, 10 bp, synthetic construct
  source 1..10: mol_type = other DNA
ggacggcatc

SEQ ID NO: 1660 - DNA, 10 bp, synthetic construct
  source 1..10: mol_type = other DNA
aacgtaactc

SEQ ID NO: 1661 - DNA, 10 bp, synthetic construct
  source 1..10: mol_type = other DNA
atggtccatc

SEQ ID NO: 1662 - DNA, 10 bp, synthetic construct
  source 1..10: mol_type = other DNA
gacaatccgt

SEQ ID NO: 1663 - DNA, 10 bp, synthetic construct
  source 1..10: mol_type = other DNA
ggaatccgat

SEQ ID NO: 1664 - DNA, 10 bp, synthetic construct
  source 1..10: mol_type = other DNA
tcctcgagtc

SEQ ID NO: 1665 - DNA, 10 bp, synthetic construct
  source 1..10: mol_type = other DNA
tcgaagagta

SEQ ID NO: 1666 - DNA, 10 bp, synthetic construct
  source 1..10: mol_type = other DNA
agcgcggcaa

SEQ ID NO: 1667 - DNA, 10 bp, synthetic construct
  source 1..10: mol_type = other DNA
taaccgaccg

SEQ ID NO: 1668 - DNA, 10 bp, synthetic construct
  source 1..10: mol_type = other DNA
ccatcctgga

SEQ ID NO: 1669 - DNA, 10 bp, synthetic construct
  source 1..10: mol_type = other DNA
ctgcaaccaa

SEQ ID NO: 1670 - DNA, 10 bp, synthetic construct
  source 1..10: mol_type = other DNA
ccagctgcct

SEQ ID NO: 1671 - DNA, 10 bp, synthetic construct
  source 1..10: mol_type = other DNA
gacgcactat

SEQ ID NO: 1672 - DNA, 10 bp, synthetic construct
  source 1..10: mol_type = other DNA
gtccacggct

SEQ ID NO: 1673 - DNA, 10 bp, synthetic construct
  source 1..10: mol_type = other DNA
ctcagcacta

SEQ ID NO: 1674 - DNA, 10 bp, synthetic construct
  source 1..10: mol_type = other DNA
agtaacggtg

SEQ ID NO: 1675 - DNA, 10 bp, synthetic construct
  source 1..10: mol_type = other DNA
tccagcaatg

SEQ ID NO: 1676 - DNA, 10 bp, synthetic construct
  source 1..10: mol_type = other DNA
ccaaccatgc

SEQ ID NO: 1677 - DNA, 10 bp, synthetic construct
  source 1..10: mol_type = other DNA
ttcggtcaat

SEQ ID NO: 1678 - DNA, 10 bp, synthetic construct
  source 1..10: mol_type = other DNA
aatcaggtct

SEQ ID NO: 1679 - DNA, 10 bp, synthetic construct
  source 1..10: mol_type = other DNA
tacgtggacg

SEQ ID NO: 1680 - DNA, 10 bp, synthetic construct
  source 1..10: mol_type = other DNA
cctgtgtcga

SEQ ID NO: 1681 - DNA, 10 bp, synthetic construct
  source 1..10: mol_type = other DNA
ctcgagtgta

SEQ ID NO: 1682 - DNA, 10 bp, synthetic construct
  source 1..10: mol_type = other DNA
tggatccttc

SEQ ID NO: 1683 - DNA, 10 bp, synthetic construct
  source 1..10: mol_type = other DNA
taggtagagt

SEQ ID NO: 1684 - DNA, 10 bp, synthetic construct
  source 1..10: mol_type = other DNA
gacttgtgtc

SEQ ID NO: 1685 - DNA, 10 bp, synthetic construct
  source 1..10: mol_type = other DNA
cttgaactta

SEQ ID NO: 1686 - DNA, 10 bp, synthetic construct
  source 1..10: mol_type = other DNA
tcaagccgag

SEQ ID NO: 1687 - DNA, 10 bp, synthetic construct
  source 1..10: mol_type = other DNA
tatggaccag

SEQ ID NO: 1688 - DNA, 10 bp, synthetic construct
  source 1..10: mol_type = other DNA
gaccttactt

SEQ ID NO: 1689 - DNA, 10 bp, synthetic construct
  source 1..10: mol_type = other DNA
cggctcggcg

SEQ ID NO: 1690 - DNA, 10 bp, synthetic construct
  source 1..10: mol_type = other DNA
tcgcatgaag

SEQ ID NO: 1691 - DNA, 10 bp, synthetic construct
  source 1..10: mol_type = other DNA
ggacgcatta

SEQ ID NO: 1692 - DNA, 10 bp, synthetic construct
  source 1..10: mol_type = other DNA
tgaacaactt

SEQ ID NO: 1693 - DNA, 10 bp, synthetic construct
  source 1..10: mol_type = other DNA
accactggct

SEQ ID NO: 1694 - DNA, 10 bp, synthetic construct
  source 1..10: mol_type = other DNA
agtgagctgt

SEQ ID NO: 1695 - DNA, 10 bp, synthetic construct
  source 1..10: mol_type = other DNA
tccgttcgtt

SEQ ID NO: 1696 - DNA, 10 bp, synthetic construct
  source 1..10: mol_type = other DNA
tctccacaac

SEQ ID NO: 1697 - DNA, 10 bp, synthetic construct
  source 1..10: mol_type = other DNA
atagtgaatc

SEQ ID NO: 1698 - DNA, 10 bp, synthetic construct
  source 1..10: mol_type = other DNA
ccttgctaga

SEQ ID NO: 1699 - DNA, 10 bp, synthetic construct
  source 1..10: mol_type = other DNA
cgatgccacg

SEQ ID NO: 1700 - DNA, 10 bp, synthetic construct
  source 1..10: mol_type = other DNA
tgactccggc

SEQ ID NO: 1701 - DNA, 10 bp, synthetic construct
  source 1..10: mol_type = other DNA
aacattagga

SEQ ID NO: 1702 - DNA, 10 bp, synthetic construct
  source 1..10: mol_type = other DNA
ccatcgtcaa

SEQ ID NO: 1703 - DNA, 10 bp, synthetic construct
  source 1..10: mol_type = other DNA
ctgacactcc

SEQ ID NO: 1704 - DNA, 10 bp, synthetic construct
  source 1..10: mol_type = other DNA
gccatcaaca

SEQ ID NO: 1705 - DNA, 10 bp, synthetic construct
  source 1..10: mol_type = other DNA
attctagtag

SEQ ID NO: 1706 - DNA, 10 bp, synthetic construct
  source 1..10: mol_type = other DNA
atatcgcacg

SEQ ID NO: 1707 - DNA, 10 bp, synthetic construct
  source 1..10: mol_type = other DNA
aagatccgac

SEQ ID NO: 1708 - DNA, 10 bp, synthetic construct
  source 1..10: mol_type = other DNA
ccgtattcga

SEQ ID NO: 1709 - DNA, 10 bp, synthetic construct
  source 1..10: mol_type = other DNA
gcatacctcg

SEQ ID NO: 1710 - DNA, 10 bp, synthetic construct
  source 1..10: mol_type = other DNA
cgacgacctg

SEQ ID NO: 1711 - DNA, 10 bp, synthetic construct
  source 1..10: mol_type = other DNA
gtcataagaa

SEQ ID NO: 1712 - DNA, 10 bp, synthetic construct
  source 1..10: mol_type = other DNA
gtcagacgct

SEQ ID NO: 1713 - DNA, 10 bp, synthetic construct
  source 1..10: mol_type = other DNA
tcgagctagc

SEQ ID NO: 1714 - DNA, 10 bp, synthetic construct
  source 1..10: mol_type = other DNA
cataccagcg

SEQ ID NO: 1715 - DNA, 10 bp, synthetic construct
  source 1..10: mol_type = other DNA
cacgcacata

SEQ ID NO: 1716 - DNA, 10 bp, synthetic construct
  source 1..10: mol_type = other DNA
cctcggtgac

SEQ ID NO: 1717 - DNA, 10 bp, synthetic construct
  source 1..10: mol_type = other DNA
ccgttcgatt

SEQ ID NO: 1718 - DNA, 10 bp, synthetic construct
  source 1..10: mol_type = other DNA
aattagtagg

SEQ ID NO: 1719 - DNA, 10 bp, synthetic construct
  source 1..10: mol_type = other DNA
acacctgcgt

SEQ ID NO: 1720 - DNA, 10 bp, synthetic construct
  source 1..10: mol_type = other DNA
cgcaccaagg

SEQ ID NO: 1721 - DNA, 10 bp, synthetic construct
  source 1..10: mol_type = other DNA
cttcgtacca

SEQ ID NO: 1722 - DNA, 10 bp, synthetic construct
  source 1..10: mol_type = other DNA
ttccgacatc

SEQ ID NO: 1723 - DNA, 10 bp, synthetic construct
  source 1..10: mol_type = other DNA
gatgacaaca

SEQ ID NO: 1724 - DNA, 10 bp, synthetic construct
  source 1..10: mol_type = other DNA
cctgtcagtt

SEQ ID NO: 1725 - DNA, 10 bp, synthetic construct
  source 1..10: mol_type = other DNA
taagagcatc

SEQ ID NO: 1726 - DNA, 10 bp, synthetic construct
  source 1..10: mol_type = other DNA
caacgacaag

SEQ ID NO: 1727 - DNA, 10 bp, synthetic construct
  source 1..10: mol_type = other DNA
gaccgcagaa

SEQ ID NO: 1728 - DNA, 10 bp, synthetic construct
  source 1..10: mol_type = other DNA
gatcaactca

SEQ ID NO: 1729 - DNA, 10 bp, synthetic construct
  source 1..10: mol_type = other DNA
aaggtcatta

SEQ ID NO: 1730 - DNA, 10 bp, synthetic construct
  source 1..10: mol_type = other DNA
ttccggcggt

SEQ ID NO: 1731 - DNA, 10 bp, synthetic construct
  source 1..10: mol_type = other DNA
gttcgttagg

SEQ ID NO: 1732 - DNA, 10 bp, synthetic construct
  source 1..10: mol_type = other DNA
attcctgctc

SEQ ID NO: 1733 - DNA, 10 bp, synthetic construct
  source 1..10: mol_type = other DNA
gtgacgaacg

SEQ ID NO: 1734 - DNA, 10 bp, synthetic construct
  source 1..10: mol_type = other DNA
ctaatgagca

SEQ ID NO: 1735 - DNA, 10 bp, synthetic construct
  source 1..10: mol_type = other DNA
atggtgaagg

SEQ ID NO: 1736 - DNA, 10 bp, synthetic construct
  source 1..10: mol_type = other DNA
gaactcctcg

SEQ ID NO: 1737 - DNA, 10 bp, synthetic construct
  source 1..10: mol_type = other DNA
agttcatcta

SEQ ID NO: 1738 - DNA, 10 bp, synthetic construct
  source 1..10: mol_type = other DNA
ttgtccaact

SEQ ID NO: 1739 - DNA, 10 bp, synthetic construct
  source 1..10: mol_type = other DNA
gccgctaacg

SEQ ID NO: 1740 - DNA, 10 bp, synthetic construct
  source 1..10: mol_type = other DNA
tgacgtccag

SEQ ID NO: 1741 - DNA, 10 bp, synthetic construct
  source 1..10: mol_type = other DNA
gagatcagtc

SEQ ID NO: 1742 - DNA, 10 bp, synthetic construct
  source 1..10: mol_type = other DNA
accgccagga

SEQ ID NO: 1743 - DNA, 10 bp, synthetic construct
  source 1..10: mol_type = other DNA
ggtagttagt

SEQ ID NO: 1744 - DNA, 10 bp, synthetic construct
  source 1..10: mol_type = other DNA
tgcgttgatt

SEQ ID NO: 1745 - DNA, 10 bp, synthetic construct
  source 1..10: mol_type = other DNA
gtggtcgcct

SEQ ID NO: 1746 - DNA, 10 bp, synthetic construct
  source 1..10: mol_type = other DNA
aatgactagt

SEQ ID NO: 1747 - DNA, 10 bp, synthetic construct
  source 1..10: mol_type = other DNA
tcttcgcacc

SEQ ID NO: 1748 - DNA, 10 bp, synthetic construct
  source 1..10: mol_type = other DNA
aagtccatct

SEQ ID NO: 1749 - DNA, 10 bp, synthetic construct
  source 1..10: mol_type = other DNA
atgagcgacg

SEQ ID NO: 1750 - DNA, 10 bp, synthetic construct
  source 1..10: mol_type = other DNA
ccggtaccac

SEQ ID NO: 1751 - DNA, 10 bp, synthetic construct
  source 1..10: mol_type = other DNA
gcgcataatg

SEQ ID NO: 1752 - DNA, 10 bp, synthetic construct
  source 1..10: mol_type = other DNA
gcattaggtc

SEQ ID NO: 1753 - DNA, 10 bp, synthetic construct
  source 1..10: mol_type = other DNA
tatcatctta

SEQ ID NO: 1754 - DNA, 10 bp, synthetic construct
  source 1..10: mol_type = other DNA
ttcgacgtta

SEQ ID NO: 1755 - DNA, 10 bp, synthetic construct
  source 1..10: mol_type = other DNA
gagacagaga

SEQ ID NO: 1756 - DNA, 10 bp, synthetic construct
  source 1..10: mol_type = other DNA
tcgctacata

SEQ ID NO: 1757 - DNA, 10 bp, synthetic construct
  source 1..10: mol_type = other DNA
ccaatgctat

SEQ ID NO: 1758 - DNA, 10 bp, synthetic construct
  source 1..10: mol_type = other DNA
gtaacgctca

SEQ ID NO: 1759 - DNA, 10 bp, synthetic construct
  source 1..10: mol_type = other DNA
atccacactc

SEQ ID NO: 1760 - DNA, 10 bp, synthetic construct
  source 1..10: mol_type = other DNA
cttaaccagg

SEQ ID NO: 1761 - DNA, 10 bp, synthetic construct
  source 1..10: mol_type = other DNA
tactaagcta

SEQ ID NO: 1762 - DNA, 10 bp, synthetic construct
  source 1..10: mol_type = other DNA
gtcctctagt

SEQ ID NO: 1763 - DNA, 10 bp, synthetic construct
  source 1..10: mol_type = other DNA
cgatatgtat

SEQ ID NO: 1764 - DNA, 10 bp, synthetic construct
  source 1..10: mol_type = other DNA
cattagctat

SEQ ID NO: 1765 - DNA, 10 bp, synthetic construct
  source 1..10: mol_type = other DNA
gccgtatgat

SEQ ID NO: 1766 - DNA, 10 bp, synthetic construct
  source 1..10: mol_type = other DNA
agcaaggcct

SEQ ID NO: 1767 - DNA, 10 bp, synthetic construct
  source 1..10: mol_type = other DNA
gaccattgaa

SEQ ID NO: 1768 - DNA, 10 bp, synthetic construct
  source 1..10: mol_type = other DNA
gtcacgtagc

SEQ ID NO: 1769 - DNA, 10 bp, synthetic construct
  source 1..10: mol_type = other DNA
cgttatcacc

SEQ ID NO: 1770 - DNA, 10 bp, synthetic construct
  source 1..10: mol_type = other DNA
tcacttggct

SEQ ID NO: 1771 - DNA, 10 bp, synthetic construct
  source 1..10: mol_type = other DNA
gtattctact

SEQ ID NO: 1772 - DNA, 10 bp, synthetic construct
  source 1..10: mol_type = other DNA
gatgcataat

SEQ ID NO: 1773 - DNA, 10 bp, synthetic construct
  source 1..10: mol_type = other DNA
gtggcatcag

SEQ ID NO: 1774 - DNA, 10 bp, synthetic construct
  source 1..10: mol_type = other DNA
atgcgcctca

SEQ ID NO: 1775 - DNA, 10 bp, synthetic construct
  source 1..10: mol_type = other DNA
cgatgtcaat

SEQ ID NO: 1776 - DNA, 10 bp, synthetic construct
  source 1..10: mol_type = other DNA
ataacatgga

SEQ ID NO: 1777 - DNA, 10 bp, synthetic construct
  source 1..10: mol_type = other DNA
tgcattaacg

SEQ ID NO: 1778 - DNA, 10 bp, synthetic construct
  source 1..10: mol_type = other DNA
taccactaca

SEQ ID NO: 1779 - DNA, 10 bp, synthetic construct
  source 1..10: mol_type = other DNA
caacattagg

SEQ ID NO: 1780 - DNA, 10 bp, synthetic construct
  source 1..10: mol_type = other DNA
gtccttgact

SEQ ID NO: 1781 - DNA, 10 bp, synthetic construct
  source 1..10: mol_type = other DNA
gtgctactga

SEQ ID NO: 1782 - DNA, 10 bp, synthetic construct
  source 1..10: mol_type = other DNA
tcaggcagcc

SEQ ID NO: 1783 - DNA, 10 bp, synthetic construct
  source 1..10: mol_type = other DNA
caggcgatga

SEQ ID NO: 1784 - DNA, 10 bp, synthetic construct
  source 1..10: mol_type = other DNA
ttagtaggtt

SEQ ID NO: 1785 - DNA, 10 bp, synthetic construct
  source 1..10: mol_type = other DNA
gaacgacggc

SEQ ID NO: 1786 - DNA, 10 bp, synthetic construct
  source 1..10: mol_type = other DNA
aacgctctag

SEQ ID NO: 1787 - DNA, 10 bp, synthetic construct
  source 1..10: mol_type = other DNA
cgcgccatct

SEQ ID NO: 1788 - DNA, 10 bp, synthetic construct
  source 1..10: mol_type = other DNA
cagtcctact

SEQ ID NO: 1789 - DNA, 10 bp, synthetic construct
  source 1..10: mol_type = other DNA
cggaacgcaa

SEQ ID NO: 1790 - DNA, 10 bp, synthetic construct
  source 1..10: mol_type = other DNA
ggagtgatgt

SEQ ID NO: 1791 - DNA, 10 bp, synthetic construct
  source 1..10: mol_type = other DNA
tgctaggatc

SEQ ID NO: 1792 - DNA, 10 bp, synthetic construct
  source 1..10: mol_type = other DNA
tacgctagct

SEQ ID NO: 1793 - DNA, 10 bp, synthetic construct
  source 1..10: mol_type = other DNA
ggcgacgctg

SEQ ID NO: 1794 - DNA, 10 bp, synthetic construct
  source 1..10: mol_type = other DNA
ccgcgcactt

SEQ ID NO: 1795 - DNA, 10 bp, synthetic construct
  source 1..10: mol_type = other DNA
caggatagat

SEQ ID NO: 1796 - DNA, 10 bp, synthetic construct
  source 1..10: mol_type = other DNA
gtagcttaga

SEQ ID NO: 1797 - DNA, 10 bp, synthetic construct
  source 1..10: mol_type = other DNA
ggagagccga

SEQ ID NO: 1798 - DNA, 10 bp, synthetic construct
  source 1..10: mol_type = other DNA
gataatgcga

SEQ ID NO: 1799 - DNA, 10 bp, synthetic construct
  source 1..10: mol_type = other DNA
gaccagtaat

SEQ ID NO: 1800 - DNA, 10 bp, synthetic construct
  source 1..10: mol_type = other DNA
tggcatctgg

SEQ ID NO: 1801 - DNA, 10 bp, synthetic construct
  source 1..10: mol_type = other DNA
ataatattgg

SEQ ID NO: 1802 - DNA, 10 bp, synthetic construct
  source 1..10: mol_type = other DNA
ctagcagaca

SEQ ID NO: 1803 - DNA, 10 bp, synthetic construct
  source 1..10: mol_type = other DNA
attacagtgc

SEQ ID NO: 1804 - DNA, 10 bp, synthetic construct
  source 1..10: mol_type = other DNA
actcggcgtg

SEQ ID NO: 1805 - DNA, 10 bp, synthetic construct
  source 1..10: mol_type = other DNA
tacgttaggc

SEQ ID NO: 1806 - DNA, 10 bp, synthetic construct
  source 1..10: mol_type = other DNA
tataagtccg

SEQ ID NO: 1807 - DNA, 10 bp, synthetic construct
  source 1..10: mol_type = other DNA
ggaattacgg

SEQ ID NO: 1808 - DNA, 10 bp, synthetic construct
  source 1..10: mol_type = other DNA
gacgatacat

SEQ ID NO: 1809 - DNA, 10 bp, synthetic construct
  source 1..10: mol_type = other DNA
gatagccaag

SEQ ID NO: 1810 - DNA, 10 bp, synthetic construct
  source 1..10: mol_type = other DNA
tgagctctgc

SEQ ID NO: 1811 - DNA, 10 bp, synthetic construct
  source 1..10: mol_type = other DNA
tgcgcagaat

SEQ ID NO: 1812 - DNA, 10 bp, synthetic construct
  source 1..10: mol_type = other DNA
gccttcctgc

SEQ ID NO: 1813 - DNA, 10 bp, synthetic construct
  source 1..10: mol_type = other DNA
gagcgacctg

SEQ ID NO: 1814 - DNA, 10 bp, synthetic construct
  source 1..10: mol_type = other DNA
gcagacgcca

SEQ ID NO: 1815 - DNA, 10 bp, synthetic construct
  source 1..10: mol_type = other DNA
cgactaggta

SEQ ID NO: 1816 - DNA, 10 bp, synthetic construct
  source 1..10: mol_type = other DNA
caatctgtgc

SEQ ID NO: 1817 - DNA, 10 bp, synthetic construct
  source 1..10: mol_type = other DNA
gtccattacg

SEQ ID NO: 1818 - DNA, 10 bp, synthetic construct
  source 1..10: mol_type = other DNA
agattgaagt

SEQ ID NO: 1819 - DNA, 10 bp, synthetic construct
  source 1..10: mol_type = other DNA
gttcaacgac

SEQ ID NO: 1820 - DNA, 10 bp, synthetic construct
  source 1..10: mol_type = other DNA
cgtaatgtcc

SEQ ID NO: 1821 - DNA, 10 bp, synthetic construct
  source 1..10: mol_type = other DNA
gccagtacgg

SEQ ID NO: 1822 - DNA, 10 bp, synthetic construct
  source 1..10: mol_type = other DNA
cattgtctta

SEQ ID NO: 1823 - DNA, 10 bp, synthetic construct
  source 1..10: mol_type = other DNA
cgtagatcgc

SEQ ID NO: 1824 - DNA, 10 bp, synthetic construct
  source 1..10: mol_type = other DNA
cttagcctcc

SEQ ID NO: 1825 - DNA, 10 bp, synthetic construct
  source 1..10: mol_type = other DNA
gaaccacagg

SEQ ID NO: 1826 - DNA, 10 bp, synthetic construct
  source 1..10: mol_type = other DNA
aaggtatatc

SEQ ID NO: 1827 - DNA, 10 bp, synthetic construct
  source 1..10: mol_type = other DNA
gtatgcaatg

SEQ ID NO: 1828 - DNA, 10 bp, synthetic construct
  source 1..10: mol_type = other DNA
tgcaaccgtg

SEQ ID NO: 1829 - DNA, 10 bp, synthetic construct
  source 1..10: mol_type = other DNA
acaccgtcgg

SEQ ID NO: 1830 - DNA, 10 bp, synthetic construct
  source 1..10: mol_type = other DNA
ggccaagtga

SEQ ID NO: 1831 - DNA, 10 bp, synthetic construct
  source 1..10: mol_type = other DNA
caagactctc

SEQ ID NO: 1832 - DNA, 10 bp, synthetic construct
  source 1..10: mol_type = other DNA
gaagtagcat

SEQ ID NO: 1833 - DNA, 10 bp, synthetic construct
  source 1..10: mol_type = other DNA
gcaggcaagg

SEQ ID NO: 1834 - DNA, 10 bp, synthetic construct
  source 1..10: mol_type = other DNA
tctggtcaac

SEQ ID NO: 1835 - DNA, 10 bp, synthetic construct
  source 1..10: mol_type = other DNA
gcgtaacaca

SEQ ID NO: 1836 - DNA, 10 bp, synthetic construct
  source 1..10: mol_type = other DNA
aatatcagca

SEQ ID NO: 1837 - DNA, 10 bp, synthetic construct
  source 1..10: mol_type = other DNA
acaggatacc

SEQ ID NO: 1838 - DNA, 10 bp, synthetic construct
  source 1..10: mol_type = other DNA
ctaatgcata

SEQ ID NO: 1839 - DNA, 10 bp, synthetic construct
  source 1..10: mol_type = other DNA
tgtgtaactg

SEQ ID NO: 1840 - DNA, 10 bp, synthetic construct
  source 1..10: mol_type = other DNA
cctgtgatac

SEQ ID NO: 1841 - DNA, 10 bp, synthetic construct
  source 1..10: mol_type = other DNA
aacgtccagt

SEQ ID NO: 1842 - DNA, 10 bp, synthetic construct
  source 1..10: mol_type = other DNA
ggagctaccg

SEQ ID NO: 1843 - DNA, 10 bp, synthetic construct
  source 1..10: mol_type = other DNA
agtatcgtac

SEQ ID NO: 1844 - DNA, 10 bp, synthetic construct
  source 1..10: mol_type = other DNA
ttggtcgttg

SEQ ID NO: 1845 - DNA, 10 bp, synthetic construct
  source 1..10: mol_type = other DNA
gtcacgacat

SEQ ID NO: 1846 - DNA, 10 bp, synthetic construct
  source 1..10: mol_type = other DNA
aatgcatcgt

SEQ ID NO: 1847 - DNA, 10 bp, synthetic construct
  source 1..10: mol_type = other DNA
aggacataac

SEQ ID NO: 1848 - DNA, 10 bp, synthetic construct
  source 1..10: mol_type = other DNA
cggtcatgtg

SEQ ID NO: 1849 - DNA, 10 bp, synthetic construct
  source 1..10: mol_type = other DNA
cgacttatct

SEQ ID NO: 1850 - DNA, 10 bp, synthetic construct
  source 1..10: mol_type = other DNA
accacgagcc

SEQ ID NO: 1851 - DNA, 10 bp, synthetic construct
  source 1..10: mol_type = other DNA
ggctgaacgg

SEQ ID NO: 1852 - DNA, 10 bp, synthetic construct
  source 1..10: mol_type = other DNA
gccaggcgaa

SEQ ID NO: 1853 - DNA, 10 bp, synthetic construct
  source 1..10: mol_type = other DNA
gaatgcggtc

SEQ ID NO: 1854 - DNA, 10 bp, synthetic construct
  source 1..10: mol_type = other DNA
tctaacaacg

SEQ ID NO: 1855 - DNA, 10 bp, synthetic construct
  source 1..10: mol_type = other DNA
ttataccgaa

SEQ ID NO: 1856 - DNA, 10 bp, synthetic construct
  source 1..10: mol_type = other DNA
acaccacagt

SEQ ID NO: 1857 - DNA, 10 bp, synthetic construct
  source 1..10: mol_type = other DNA
tcagacaccg

SEQ ID NO: 1858 - DNA, 10 bp, synthetic construct
  source 1..10: mol_type = other DNA
gtagccacaa

SEQ ID NO: 1859 - DNA, 10 bp, synthetic construct
  source 1..10: mol_type = other DNA
gacgaggcga

SEQ ID NO: 1860 - DNA, 10 bp, synthetic construct
  source 1..10: mol_type = other DNA
atctacatat

SEQ ID NO: 1861 - DNA, 10 bp, synthetic construct
  source 1..10: mol_type = other DNA
tgagacgttg

SEQ ID NO: 1862 - DNA, 10 bp, synthetic construct
  source 1..10: mol_type = other DNA
attctgccga

SEQ ID NO: 1863 - DNA, 10 bp, synthetic construct
  source 1..10: mol_type = other DNA
cagatcgaga

SEQ ID NO: 1864 - DNA, 10 bp, synthetic construct
  source 1..10: mol_type = other DNA
gagcgctgtt

SEQ ID NO: 1865 - DNA, 10 bp, synthetic construct
  source 1..10: mol_type = other DNA
gcacaattat

SEQ ID NO: 1866 - DNA, 10 bp, synthetic construct
  source 1..10: mol_type = other DNA
gcaattcgcc

SEQ ID NO: 1867 - DNA, 10 bp, synthetic construct
  source 1..10: mol_type = other DNA
atatatagta

SEQ ID NO: 1868 - DNA, 10 bp, synthetic construct
  source 1..10: mol_type = other DNA
aaccgtagtt

SEQ ID NO: 1869 - DNA, 10 bp, synthetic construct
  source 1..10: mol_type = other DNA
cacattgtca

SEQ ID NO: 1870 - DNA, 10 bp, synthetic construct
  source 1..10: mol_type = other DNA
agacagtcaa

SEQ ID NO: 1871 - DNA, 10 bp, synthetic construct
  source 1..10: mol_type = other DNA
tgacaaggac

SEQ ID NO: 1872 - DNA, 10 bp, synthetic construct
  source 1..10: mol_type = other DNA
tatatagccg

SEQ ID NO: 1873 - DNA, 10 bp, synthetic construct
  source 1..10: mol_type = other DNA
gttctcagat

SEQ ID NO: 1874 - DNA, 10 bp, synthetic construct
  source 1..10: mol_type = other DNA
gataatctcc

SEQ ID NO: 1875 - DNA, 10 bp, synthetic construct
  source 1..10: mol_type = other DNA
ggtccttgta

SEQ ID NO: 1876 - DNA, 10 bp, synthetic construct
  source 1..10: mol_type = other DNA
gaacagactg

SEQ ID NO: 1877 - DNA, 10 bp, synthetic construct
  source 1..10: mol_type = other DNA
gaagaatcta

SEQ ID NO: 1878 - DNA, 10 bp, synthetic construct
  source 1..10: mol_type = other DNA
cgttgaattg

SEQ ID NO: 1879 - DNA, 10 bp, synthetic construct
  source 1..10: mol_type = other DNA
ggtaccgctg

SEQ ID NO: 1880 - DNA, 10 bp, synthetic construct
  source 1..10: mol_type = other DNA
gtgcacgcag

SEQ ID NO: 1881 - DNA, 10 bp, synthetic construct
  source 1..10: mol_type = other DNA
attcgatatt

SEQ ID NO: 1882 - DNA, 10 bp, synthetic construct
  source 1..10: mol_type = other DNA
ctgaatgacc

SEQ ID NO: 1883 - DNA, 10 bp, synthetic construct
  source 1..10: mol_type = other DNA
ctattaagga

SEQ ID NO: 1884 - DNA, 10 bp, synthetic construct
  source 1..10: mol_type = other DNA
gaatcacaat

SEQ ID NO: 1885 - DNA, 10 bp, synthetic construct
  source 1..10: mol_type = other DNA
aaggacctct

SEQ ID NO: 1886 - DNA, 10 bp, synthetic construct
  source 1..10: mol_type = other DNA
tctcaataca

SEQ ID NO: 1887 - DNA, 10 bp, synthetic construct
  source 1..10: mol_type = other DNA
atgaagccat

SEQ ID NO: 1888 - DNA, 10 bp, synthetic construct
  source 1..10: mol_type = other DNA
ccaatctacc

SEQ ID NO: 1889 - DNA, 10 bp, synthetic construct
  source 1..10: mol_type = other DNA
tctgaagtcc

SEQ ID NO: 1890 - DNA, 10 bp, synthetic construct
  source 1..10: mol_type = other DNA
gcaaggttca

SEQ ID NO: 1891 - DNA, 10 bp, synthetic construct
  source 1..10: mol_type = other DNA
cgtaatcaag

SEQ ID NO: 1892 - DNA, 10 bp, synthetic construct
  source 1..10: mol_type = other DNA
tgtgaatata

SEQ ID NO: 1893 - DNA, 10 bp, synthetic construct
  source 1..10: mol_type = other DNA
ggttgagtaa

SEQ ID NO: 1894 - DNA, 10 bp, synthetic construct
  source 1..10: mol_type = other DNA
acgtagacca

SEQ ID NO: 1895 - DNA, 10 bp, synthetic construct
  source 1..10: mol_type = other DNA
tatcgacaga

SEQ ID NO: 1896 - DNA, 10 bp, synthetic construct
  source 1..10: mol_type = other DNA
atcgtactgt

SEQ ID NO: 1897 - DNA, 10 bp, synthetic construct
  source 1..10: mol_type = other DNA
taaggcttgt

SEQ ID NO: 1898 - DNA, 10 bp, synthetic construct
  source 1..10: mol_type = other DNA
tgtagcctga

SEQ ID NO: 1899 - DNA, 10 bp, synthetic construct
  source 1..10: mol_type = other DNA
ggaccatagc

SEQ ID NO: 1900 - DNA, 10 bp, synthetic construct
  source 1..10: mol_type = other DNA
cggtggcaga

SEQ ID NO: 1901 - DNA, 10 bp, synthetic construct
  source 1..10: mol_type = other DNA
actccggtca

SEQ ID NO: 1902 - DNA, 10 bp, synthetic construct
  source 1..10: mol_type = other DNA
gttactggtg

SEQ ID NO: 1903 - DNA, 10 bp, synthetic construct
  source 1..10: mol_type = other DNA
ggatcgcggc

SEQ ID NO: 1904 - DNA, 10 bp, synthetic construct
  source 1..10: mol_type = other DNA
agatggtaac

SEQ ID NO: 1905 - DNA, 10 bp, synthetic construct
  source 1..10: mol_type = other DNA
gctgaaccac

SEQ ID NO: 1906 - DNA, 10 bp, synthetic construct
  source 1..10: mol_type = other DNA
gcaggcttcc

SEQ ID NO: 1907 - DNA, 10 bp, synthetic construct
  source 1..10: mol_type = other DNA
aacgctacga

SEQ ID NO: 1908 - DNA, 10 bp, synthetic construct
  source 1..10: mol_type = other DNA
gtcatgcagg

SEQ ID NO: 1909 - DNA, 10 bp, synthetic construct
  source 1..10: mol_type = other DNA
ctctctatcc

SEQ ID NO: 1910 - DNA, 10 bp, synthetic construct
  source 1..10: mol_type = other DNA
taagttagat

SEQ ID NO: 1911 - DNA, 10 bp, synthetic construct
  source 1..10: mol_type = other DNA
aacaatacaa

SEQ ID NO: 1912 - DNA, 10 bp, synthetic construct
  source 1..10: mol_type = other DNA
tgttaggctg

SEQ ID NO: 1913 - DNA, 10 bp, synthetic construct
  source 1..10: mol_type = other DNA
acctcgatgt

SEQ ID NO: 1914 - DNA, 10 bp, synthetic construct
  source 1..10: mol_type = other DNA
atgtatcgaa

SEQ ID NO: 1915 - DNA, 10 bp, synthetic construct
  source 1..10: mol_type = other DNA
gcatcacttg

SEQ ID NO: 1916 - DNA, 10 bp, synthetic construct
  source 1..10: mol_type = other DNA
ccgatgactt

SEQ ID NO: 1917 - DNA, 10 bp, synthetic construct
  source 1..10: mol_type = other DNA
ttatgacctc

SEQ ID NO: 1918 - DNA, 10 bp, synthetic construct
  source 1..10: mol_type = other DNA
gaataacgac

SEQ ID NO: 1919 - DNA, 10 bp, synthetic construct
  source 1..10: mol_type = other DNA
catgttgcat

SEQ ID NO: 1920 - DNA, 10 bp, synthetic construct
  source 1..10: mol_type = other DNA
caatccttcc

SEQ ID NO: 1921 - DNA, 10 bp, synthetic construct
  source 1..10: mol_type = other DNA
taggccacgc

SEQ ID NO: 1922 - DNA, 10 bp, synthetic construct
  source 1..10: mol_type = other DNA
agatgacacc

SEQ ID NO: 1923 - DNA, 10 bp, synthetic construct
  source 1..10: mol_type = other DNA
aatcgaacag

SEQ ID NO: 1924 - DNA, 10 bp, synthetic construct
  source 1..10: mol_type = other DNA
accgtatcag

SEQ ID NO: 1925 - DNA, 10 bp, synthetic construct
  source 1..10: mol_type = other DNA
tggtagttgc

SEQ ID NO: 1926 - DNA, 10 bp, synthetic construct
  source 1..10: mol_type = other DNA
ggagttcgag

SEQ ID NO: 1927 - DNA, 10 bp, synthetic construct
  source 1..10: mol_type = other DNA
cctactaaga

SEQ ID NO: 1928 - DNA, 10 bp, synthetic construct
  source 1..10: mol_type = other DNA
atcgagaata

SEQ ID NO: 1929 - DNA, 10 bp, synthetic construct
  source 1..10: mol_type = other DNA
aacctacacg

SEQ ID NO: 1930 - DNA, 10 bp, synthetic construct
  source 1..10: mol_type = other DNA
ataagctgca

SEQ ID NO: 1931 - DNA, 10 bp, synthetic construct
  source 1..10: mol_type = other DNA
atgactccgg

SEQ ID NO: 1932 - DNA, 10 bp, synthetic construct
  source 1..10: mol_type = other DNA
ctctggacac

SEQ ID NO: 1933 - DNA, 10 bp, synthetic construct
  source 1..10: mol_type = other DNA
gcgccaactg

SEQ ID NO: 1934 - DNA, 10 bp, synthetic construct
  source 1..10: mol_type = other DNA
cacacggccg

SEQ ID NO: 1935 - DNA, 10 bp, synthetic construct
  source 1..10: mol_type = other DNA
gtcacacaat

SEQ ID NO: 1936 - DNA, 10 bp, synthetic construct
  source 1..10: mol_type = other DNA
cgtcgcaagc

SEQ ID NO: 1937 - DNA, 10 bp, synthetic construct
  source 1..10: mol_type = other DNA
cggtagcaat

SEQ ID NO: 1938 - DNA, 10 bp, synthetic construct
  source 1..10: mol_type = other DNA
gtcttacctc

SEQ ID NO: 1939 - DNA, 10 bp, synthetic construct
  source 1..10: mol_type = other DNA
aacaagcact

SEQ ID NO: 1940 - DNA, 10 bp, synthetic construct
  source 1..10: mol_type = other DNA
cttagcgagt

SEQ ID NO: 1941 - DNA, 10 bp, synthetic construct
  source 1..10: mol_type = other DNA
gaggtgttca

SEQ ID NO: 1942 - DNA, 10 bp, synthetic construct
  source 1..10: mol_type = other DNA
attatgcatc

SEQ ID NO: 1943 - DNA, 10 bp, synthetic construct
  source 1..10: mol_type = other DNA
gcgacggatc

SEQ ID NO: 1944 - DNA, 10 bp, synthetic construct
  source 1..10: mol_type = other DNA
caagcaggta

SEQ ID NO: 1945 - DNA, 10 bp, synthetic construct
  source 1..10: mol_type = other DNA
ccacacgtag

SEQ ID NO: 1946 - DNA, 10 bp, synthetic construct
  source 1..10: mol_type = other DNA
tcagtcgcgg

SEQ ID NO: 1947 - DNA, 10 bp, synthetic construct
  source 1..10: mol_type = other DNA
atgatcgctc

SEQ ID NO: 1948 - DNA, 10 bp, synthetic construct
  source 1..10: mol_type = other DNA
aggcgtaact

SEQ ID NO: 1949 - DNA, 10 bp, synthetic construct
  source 1..10: mol_type = other DNA
tatgaacaca

SEQ ID NO: 1950 - DNA, 10 bp, synthetic construct
  source 1..10: mol_type = other DNA
acaatcgtag

SEQ ID NO: 1951 - DNA, 10 bp, synthetic construct
  source 1..10: mol_type = other DNA
atagaggaca

SEQ ID NO: 1952 - DNA, 10 bp, synthetic construct
  source 1..10: mol_type = other DNA
agtgtacatg

SEQ ID NO: 1953 - DNA, 10 bp, synthetic construct
  source 1..10: mol_type = other DNA
gcgtgacatc

SEQ ID NO: 1954 - DNA, 10 bp, synthetic construct
  source 1..10: mol_type = other DNA
accacagcaa

SEQ ID NO: 1955 - DNA, 10 bp, synthetic construct
  source 1..10: mol_type = other DNA
tcagttaacc

SEQ ID NO: 1956 - DNA, 10 bp, synthetic construct
  source 1..10: mol_type = other DNA
aggacttaga

SEQ ID NO: 1957 - DNA, 10 bp, synthetic construct
  source 1..10: mol_type = other DNA
ctgagtatct

SEQ ID NO: 1958 - DNA, 10 bp, synthetic construct
  source 1..10: mol_type = other DNA
cggcctatat

SEQ ID NO: 1959 - DNA, 10 bp, synthetic construct
  source 1..10: mol_type = other DNA
gcgtagtgat

SEQ ID NO: 1960 - DNA, 10 bp, synthetic construct
  source 1..10: mol_type = other DNA
cggcgagcgg

SEQ ID NO: 1961 - DNA, 10 bp, synthetic construct
  source 1..10: mol_type = other DNA
cagtgtggct

SEQ ID NO: 1962 - DNA, 10 bp, synthetic construct
  source 1..10: mol_type = other DNA
atgaataggt

SEQ ID NO: 1963 - DNA, 10 bp, synthetic construct
  source 1..10: mol_type = other DNA
tggtcctcga

SEQ ID NO: 1964 - DNA, 10 bp, synthetic construct
  source 1..10: mol_type = other DNA
acgtgcggtt

SEQ ID NO: 1965 - DNA, 10 bp, synthetic construct
  source 1..10: mol_type = other DNA
cgtgttcaca

SEQ ID NO: 1966 - DNA, 10 bp, synthetic construct
  source 1..10: mol_type = other DNA
gttaatcgtc

SEQ ID NO: 1967 - DNA, 10 bp, synthetic construct
  source 1..10: mol_type = other DNA
atgtcacagt

SEQ ID NO: 1968 - DNA, 10 bp, synthetic construct
  source 1..10: mol_type = other DNA
ctggctactg

SEQ ID NO: 1969 - DNA, 10 bp, synthetic construct
  source 1..10: mol_type = other DNA
catctggtca

SEQ ID NO: 1970 - DNA, 10 bp, synthetic construct
  source 1..10: mol_type = other DNA
ttacgctcta

SEQ ID NO: 1971 - DNA, 10 bp, synthetic construct
  source 1..10: mol_type = other DNA
tcgattcatt

SEQ ID NO: 1972 - DNA, 10 bp, synthetic construct
  source 1..10: mol_type = other DNA
atgaagatca

SEQ ID NO: 1973 - DNA, 10 bp, synthetic construct
  source 1..10: mol_type = other DNA
ccatctaagt

SEQ ID NO: 1974 - DNA, 10 bp, synthetic construct
  source 1..10: mol_type = other DNA
gcgaacaact

SEQ ID NO: 1975 - DNA, 10 bp, synthetic construct
  source 1..10: mol_type = other DNA
cacacacctc

SEQ ID NO: 1976 - DNA, 10 bp, synthetic construct
  source 1..10: mol_type = other DNA
gccgacacct

SEQ ID NO: 1977 - DNA, 10 bp, synthetic construct
  source 1..10: mol_type = other DNA
tcgtatgagc

SEQ ID NO: 1978 - DNA, 10 bp, synthetic construct
  source 1..10: mol_type = other DNA
ggttacgaga

SEQ ID NO: 1979 - DNA, 10 bp, synthetic construct
  source 1..10: mol_type = other DNA
gatcagagcc

SEQ ID NO: 1980 - DNA, 10 bp, synthetic construct
  source 1..10: mol_type = other DNA
agagcctgtc

SEQ ID NO: 1981 - DNA, 10 bp, synthetic construct
  source 1..10: mol_type = other DNA
gagctagcct

SEQ ID NO: 1982 - DNA, 10 bp, synthetic construct
  source 1..10: mol_type = other DNA
cagaggttcc

SEQ ID NO: 1983 - DNA, 10 bp, synthetic construct
  source 1..10: mol_type = other DNA
tctgagacct

SEQ ID NO: 1984 - DNA, 10 bp, synthetic construct
  source 1..10: mol_type = other DNA
agtctctagg

SEQ ID NO: 1985 - DNA, 10 bp, synthetic construct
  source 1..10: mol_type = other DNA
agtccacgta

SEQ ID NO: 1986 - DNA, 10 bp, synthetic construct
  source 1..10: mol_type = other DNA
acttctagag

SEQ ID NO: 1987 - DNA, 10 bp, synthetic construct
  source 1..10: mol_type = other DNA
ggcttctgat

SEQ ID NO: 1988 - DNA, 10 bp, synthetic construct
  source 1..10: mol_type = other DNA
ccatggtggc

SEQ ID NO: 1989 - DNA, 10 bp, synthetic construct
  source 1..10: mol_type = other DNA
agagcttgcg

SEQ ID NO: 1990 - DNA, 10 bp, synthetic construct
  source 1..10: mol_type = other DNA
tcttccgaat

SEQ ID NO: 1991 - DNA, 10 bp, synthetic construct
  source 1..10: mol_type = other DNA
ggttgccgca

SEQ ID NO: 1992 - DNA, 10 bp, synthetic construct
  source 1..10: mol_type = other DNA
gcacaagtgg

SEQ ID NO: 1993 - DNA, 10 bp, synthetic construct
  source 1..10: mol_type = other DNA
gacttcttca

SEQ ID NO: 1994 - DNA, 10 bp, synthetic construct
  source 1..10: mol_type = other DNA
taagacagac

SEQ ID NO: 1995 - DNA, 10 bp, synthetic construct
  source 1..10: mol_type = other DNA
tggtgaccac

SEQ ID NO: 1996 - DNA, 10 bp, synthetic construct
  source 1..10: mol_type = other DNA
gactaataag

SEQ ID NO: 1997 - DNA, 10 bp, synthetic construct
  source 1..10: mol_type = other DNA
gcaaccgttc

SEQ ID NO: 1998 - DNA, 10 bp, synthetic construct
  source 1..10: mol_type = other DNA
ttgaacggca

SEQ ID NO: 1999 - DNA, 10 bp, synthetic construct
  source 1..10: mol_type = other DNA
atggccacct

SEQ ID NO: 2000 - DNA, 10 bp, synthetic construct
  source 1..10: mol_type = other DNA
aagaggaatg

SEQ ID NO: 2001 - DNA, 10 bp, synthetic construct
  source 1..10: mol_type = other DNA
gcaggtggaa

SEQ ID NO: 2002 - DNA, 10 bp, synthetic construct
  source 1..10: mol_type = other DNA
cgccgaatat

SEQ ID NO: 2003 - DNA, 10 bp, synthetic construct
  source 1..10: mol_type = other DNA
caacgtgccg

SEQ ID NO: 2004 - DNA, 10 bp, synthetic construct
  source 1..10: mol_type = other DNA
acaggtacac

SEQ ID NO: 2005 - DNA, 10 bp, synthetic construct
  source 1..10: mol_type = other DNA
gaacgtaagg

SEQ ID NO: 2006 - DNA, 10 bp, synthetic construct
  source 1..10: mol_type = other DNA
gcctaacaat

SEQ ID NO: 2007 - DNA, 10 bp, synthetic construct
  source 1..10: mol_type = other DNA
aacgtgcgcg

SEQ ID NO: 2008 - DNA, 10 bp, synthetic construct
  source 1..10: mol_type = other DNA
aggtacggct

SEQ ID NO: 2009 - DNA, 10 bp, synthetic construct
  source 1..10: mol_type = other DNA
taccaacgta

SEQ ID NO: 2010 - DNA, 10 bp, synthetic construct
  source 1..10: mol_type = other DNA
ctaagcaaga

SEQ ID NO: 2011 - DNA, 10 bp, synthetic construct
  source 1..10: mol_type = other DNA
ctcgcaggac

SEQ ID NO: 2012 - DNA, 10 bp, synthetic construct
  source 1..10: mol_type = other DNA
atcgtcgtcc

SEQ ID NO: 2013 - DNA, 10 bp, synthetic construct
  source 1..10: mol_type = other DNA
tcaccgctcc

SEQ ID NO: 2014 - DNA, 10 bp, synthetic construct
  source 1..10: mol_type = other DNA
ttatattcat

SEQ ID NO: 2015 - DNA, 10 bp, synthetic construct
  source 1..10: mol_type = other DNA
cattgtgatt

SEQ ID NO: 2016 - DNA, 10 bp, synthetic construct
  source 1..10: mol_type = other DNA
aaggctggtt

SEQ ID NO: 2017 - DNA, 10 bp, synthetic construct
  source 1..10: mol_type = other DNA
aggaggatat

SEQ ID NO: 2018 - DNA, 10 bp, synthetic construct
  source 1..10: mol_type = other DNA
acgaccgtca

SEQ ID NO: 2019 - DNA, 10 bp, synthetic construct
  source 1..10: mol_type = other DNA
cgcgtagtgg

SEQ ID NO: 2020 - DNA, 10 bp, synthetic construct
  source 1..10: mol_type = other DNA
attcacgctg

SEQ ID NO: 2021 - DNA, 10 bp, synthetic construct
  source 1..10: mol_type = other DNA
agtgttgcac

SEQ ID NO: 2022 - DNA, 10 bp, synthetic construct
  source 1..10: mol_type = other DNA
acgattgagc

SEQ ID NO: 2023 - DNA, 10 bp, synthetic construct
  source 1..10: mol_type = other DNA
gcaatcaatg

SEQ ID NO: 2024 - DNA, 10 bp, synthetic construct
  source 1..10: mol_type = other DNA
ggcatccaac

SEQ ID NO: 2025 - DNA, 10 bp, synthetic construct
  source 1..10: mol_type = other DNA
tatgtcgctc

SEQ ID NO: 2026 - DNA, 10 bp, synthetic construct
  source 1..10: mol_type = other DNA
tgcgttcgac

SEQ ID NO: 2027 - DNA, 10 bp, synthetic construct
  source 1..10: mol_type = other DNA
ttgaagcgag

SEQ ID NO: 2028 - DNA, 10 bp, synthetic construct
  source 1..10: mol_type = other DNA
gcctcactga

SEQ ID NO: 2029 - DNA, 10 bp, synthetic construct
  source 1..10: mol_type = other DNA
ctatagcaag

SEQ ID NO: 2030 - DNA, 10 bp, synthetic construct
  source 1..10: mol_type = other DNA
ggtgcaacgg

SEQ ID NO: 2031 - DNA, 10 bp, synthetic construct
  source 1..10: mol_type = other DNA
ggccgcgtag

SEQ ID NO: 2032 - DNA, 10 bp, synthetic construct
  source 1..10: mol_type = other DNA
aagagagagt

SEQ ID NO: 2033 - DNA, 10 bp, synthetic construct
  source 1..10: mol_type = other DNA
aggttgtagg

SEQ ID NO: 2034 - DNA, 10 bp, synthetic construct
  source 1..10: mol_type = other DNA
tacttaggaa

SEQ ID NO: 2035 - DNA, 10 bp, synthetic construct
  source 1..10: mol_type = other DNA
aaggtcgtgg

SEQ ID NO: 2036 - DNA, 10 bp, synthetic construct
  source 1..10: mol_type = other DNA
tggagttaat

SEQ ID NO: 2037 - DNA, 10 bp, synthetic construct
  source 1..10: mol_type = other DNA
taaccgcaag

SEQ ID NO: 2038 - DNA, 10 bp, synthetic construct
  source 1..10: mol_type = other DNA
attagtcctg

SEQ ID NO: 2039 - DNA, 10 bp, synthetic construct
  source 1..10: mol_type = other DNA
ataggtggca

SEQ ID NO: 2040 - DNA, 10 bp, synthetic construct
  source 1..10: mol_type = other DNA
gagtgccatg

SEQ ID NO: 2041 - DNA, 10 bp, synthetic construct
  source 1..10: mol_type = other DNA
ttgagaatca

SEQ ID NO: 2042 - DNA, 10 bp, synthetic construct
  source 1..10: mol_type = other DNA
ggctggtccg

SEQ ID NO: 2043 - DNA, 10 bp, synthetic construct
  source 1..10: mol_type = other DNA
cggcgctcgc

SEQ ID NO: 2044 - DNA, 10 bp, synthetic construct
  source 1..10: mol_type = other DNA
gcaatagaac

SEQ ID NO: 2045 - DNA, 10 bp, synthetic construct
  source 1..10: mol_type = other DNA
tcgccttgcg

SEQ ID NO: 2046 - DNA, 10 bp, synthetic construct
  source 1..10: mol_type = other DNA
cctcttcgta

SEQ ID NO: 2047 - DNA, 10 bp, synthetic construct
  source 1..10: mol_type = other DNA
gatgatatgg

SEQ ID NO: 2048 - DNA, 10 bp, synthetic construct
  source 1..10: mol_type = other DNA
gagcggctta

SEQ ID NO: 2049 - DNA, 10 bp, synthetic construct
  source 1..10: mol_type = other DNA
atgttaacat

SEQ ID NO: 2050 - DNA, 10 bp, synthetic construct
  source 1..10: mol_type = other DNA
aaggatcgcg

SEQ ID NO: 2051 - DNA, 10 bp, synthetic construct
  source 1..10: mol_type = other DNA
atggcatggt

SEQ ID NO: 2052 - DNA, 10 bp, synthetic construct
  source 1..10: mol_type = other DNA
ctaataacct

SEQ ID NO: 2053 - DNA, 10 bp, synthetic construct
  source 1..10: mol_type = other DNA
actcgcacat

SEQ ID NO: 2054 - DNA, 10 bp, synthetic construct
  source 1..10: mol_type = other DNA
atgatatatt

SEQ ID NO: 2055 - DNA, 19 bp, synthetic construct
  source 1..19: mol_type = other DNA
cacgacgctcttccgatct

SEQ ID NO: 2056 - DNA, 25 bp, synthetic construct
  source 1..25: mol_type = other DNA
caaacatagactcctcgcatagcct

SEQ ID NO: 2057 - DNA, 24 bp, synthetic construct
  source 1..24: mol_type = other DNA
ctcggagatgtgtataagagacag

SEQ ID NO: 2058 - DNA, 20 bp, synthetic construct
  source 1..20: mol_type = other DNA
acctccatccgagacacacg

SEQ ID NO: 2059 - DNA, 29 bp, synthetic construct
  source 1..29: mol_type = other DNA
aatgatacggcgaccaccgagatctacac

SEQ ID NO: 2060 - DNA, 33 bp, synthetic construct
  source 1..33: mol_type = other DNA
acactctttccctacacgacgctcttccgatct

SEQ ID NO: 2061 - DNA, 34 bp, synthetic construct
  source 1..34: mol_type = other DNA
ctgtctcttatacacatctccgagcccacgagac

SEQ ID NO: 2062 - DNA, 24 bp, synthetic construct
  source 1..24: mol_type = other DNA
ctcggagatgtgtataagagacag

SEQ ID NO: 2063 - DNA, 47 bp, synthetic construct
  source 1..47: mol_type = other DNA
cctccatccgagacacacgattgatggttttttttttttttttttvn

SEQ ID NO: 2064 - DNA, 15 bp, synthetic construct
  source 1..15: mol_type = other DNA
  modified_base 4: mod_base = OTHER; note = Locked nucleic acid
  modified_base 6: mod_base = OTHER; note = Locked nucleic acid
  modified_base 8: mod_base = OTHER; note = Locked nucleic acid
  modified_base 10: mod_base = OTHER; note = Locked nucleic acid
  modified_base 12: mod_base = OTHER; note = Locked nucleic acid
  modified_base 14: mod_base = OTHER; note = Locked nucleic acid
accatcaatcgtgtg

SEQ ID NO: 2065 - DNA, 54 bp, synthetic construct
  source 1..54: mol_type = other DNA
cacgacgctcttccgatcttcagtatcctcaaacatagactcctcgcatagcct

SEQ ID NO: 2066 - DNA, 54 bp, synthetic construct
  source 1..54: mol_type = other DNA
ctcggagatgtgtataagagacagcacgccaacgacctccatccgagacacacg

SEQ ID NO: 2067 - DNA, 72 bp, synthetic construct
  source 1..72: mol_type = other DNA
aatgatacggcgaccaccgagatctacactacgaatcttacactctttccctacacgacgctcttccgatct

SEQ ID NO: 2068 - DNA, 68 bp, synthetic construct
  source 1..68: mol_type = other DNA
ctgtctcttatacacatctccgagcccacgagacaccaagttacctcggagatgtgtataagagacag

SEQ ID NO: 2069 - DNA, 33 bp, synthetic construct
  source 1..33: mol_type = other DNA
ctgtctcttatacacatctccgagcccacgaga

1. A primer set for amplification of a microRNA isoform (isomiR), comprising a universal sequence and a 5′-terminus amplification primer linked sequentially to a partial sequence of a 5′ terminus of a microRNA (miRNA).

2. The primer set for amplification of an isomiR according to claim 1, wherein the miRNA comprises at least one selected from the group consisting of the following: hsa-miR-21-5p, hsa-miR-223-3p, hsa-miR-223-5p, hsa-miR-186-5p, hsa-miR-18a-5p, hsa-miR-146b-5p, hsa-miR-624-5p, hsa-miR-106b-5p, hsa-miR-340-5p, hsa-miR-20a-5p, hsa-miR-451a, hsa-miR-7976, hsa-miR-2355-3p, hsa-miR-301a-3p, hsa-miR-144-5p, hsa-miR-151a-3p, hsa-miR-3200-5p, hsa-miR-1537-3p, hsa-miR-500a-5p, hsa-miR-127-3p, hsa-miR-570-3p, hsa-miR-130b-5p, hsa-miR-503-5p, hsa-miR-551a, hsa-miR-409-3p, hsa-miR-330-3p, hsa-miR-889-3p, hsa-miR-625-5p, hsa-miR-542-3p, hsa-miR-582-3p, hsa-miR-381-3p, hsa-miR-495-3p, hsa-miR-103a-1-5p, hsa-miR-450b-5p, hsa-miR-429, hsa-miR-576-5p, hsa-miR-148b-3p, hsa-miR-320c, hsa-miR-4286, hsa-miR-126-3p, hsa-miR-152-3p, hsa-miR-144-3p, hsa-miR-195-5p, hsa-let-7a-5p, hsa-miR-378f, hsa-miR-126-5p, hsa-miR-26a-5p, hsa-miR-29a-3p, hsa-miR-181a-5p, hsa-miR-32-5p, hsa-miR-142-3p, hsa-miR-29c-3p, hsa-miR-424-5p, hsa-miR-192-5p, hsa-miR-143-3p, hsa-miR-30c-5p, hsa-miR-146a-5p, hsa-miR-101-3p, hsa-miR-19b-3p, hsa-miR-33b-5p, hsa-miR-378a-3p, hsa-miR-22-3p, hsa-miR-107, hsa-miR-497-5p, hsa-miR-15a-3p, hsa-miR-188-5p, hsa-let-7d-3p, hsa-miR-132-3p, hsa-miR-151a-5p, hsa-miR-194-5p, hsa-miR-99a-5p, hsa-miR-125b-5p, hsa-miR-25-3p, hsa-miR-103a-3p, hsa-miR-1285-3p, hsa-miR-7977, hsa-miR-30b-5p, hsa-miR-363-3p, hsa-miR-93-5p, hsa-miR-375-3p, hsa-miR-99b-5p, hsa-miR-193b-3p, hsa-miR-324-3p, hsa-miR-193a-3p, hsa-miR-342-3p, hsa-miR-484, hsa-miR-532-3p, hsa-miR-210-3p, hsa-miR-2110, hsa-miR-296-5p, hsa-miR-1307-5p, hsa-miR-19a-3p, hsa-miR-139-5p, hsa-miR-3665, hsa-miR-RG-84, hsa-miR-4454, and hsa-let-7b-5p; and
nucleotide sequences of corresponding 5′-terminus amplification primers are shown in SEQ ID NO: 1 to SEQ ID NO: 97, respectively.

3. The primer set for amplification of an isomiR according to claim 1, further comprising a second polymerase chain reaction (PCR) preamplification primer pair and/or a third PCR preamplification primer pair;
the second PCR preamplification primer pair comprises a transition primer and a reverse primer for amplifying the isomiR;
a nucleotide sequence of the transition primer is shown in SEQ ID NO: 99;
a nucleotide sequence of the reverse primer for amplifying the isomiR is shown in SEQ ID NO: 100;
the third PCR preamplification primer pair comprises a 5′ universal primer and a 3′ universal primer;
a nucleotide sequence of the 5′ universal primer is shown in SEQ ID NO: 101; and
a nucleotide sequence of the 3′ universal primer is shown in SEQ ID NO: 102.

4. A method for amplifying an isomiR, comprising the following steps:
extracting total RNA from each of a gastric cancer sample and a non-gastric cancer sample, and reverse-transcribing the total RNA into cDNA;
with the cDNA as a template, conducting a first PCR preamplification using the primer set to obtain a first preamplification product, the primer set comprising a universal sequence and a 5′-terminus amplification primer linked sequentially to a partial sequence of a 5′ terminus of a microRNA (miRNA), wherein the miRNA comprises at least one selected from the group consisting of the following: hsa-miR-21-5p, hsa-miR-223-3p, hsa-miR-223-5p, hsa-miR-186-5p, hsa-miR-18a-5p, hsa-miR-146b-5p, hsa-miR-624-5p, hsa-miR-106b-5p, hsa-miR-340-5p, hsa-miR-20a-5p, hsa-miR-451a, hsa-miR-7976, hsa-miR-2355-3p, hsa-miR-301a-3p, hsa-miR-144-5p, hsa-miR-151a-3p, hsa-miR-3200-5p, hsa-miR-1537-3p, hsa-miR-500a-5p, hsa-miR-127-3p, hsa-miR-570-3p, hsa-miR-130b-5p, hsa-miR-503-5p, hsa-miR-551a, hsa-miR-409-3p, hsa-miR-330-3p, hsa-miR-889-3p, hsa-miR-625-5p, hsa-miR-542-3p, hsa-miR-582-3p, hsa-miR-381-3p, hsa-miR-495-3p, hsa-miR-103a-1-5p, hsa-miR-450b-5p, hsa-miR-429, hsa-miR-576-5p, hsa-miR-148b-3p, hsa-miR-320c, hsa-miR-4286, hsa-miR-126-3p, hsa-miR-152-3p, hsa-miR-144-3p, hsa-miR-195-5p, hsa-let-7a-5p, hsa-miR-378f, hsa-miR-126-5p, hsa-miR-26a-5p, hsa-miR-29a-3p, hsa-miR-181a-5p, hsa-miR-32-5p, hsa-miR-142-3p, hsa-miR-29c-3p, hsa-miR-424-5p, hsa-miR-192-5p, hsa-miR-143-3p, hsa-miR-30c-5p, hsa-miR-146a-5p, hsa-miR-101-3p, hsa-miR-19b-3p, hsa-miR-33b-5p, hsa-miR-378a-3p, hsa-miR-22-3p, hsa-miR-107, hsa-miR-497-5p, hsa-miR-15a-3p, hsa-miR-188-5p, hsa-let-7d-3p, hsa-miR-132-3p, hsa-miR-151a-5p, hsa-miR-194-5p, hsa-miR-99a-5p, hsa-miR-125b-5p, hsa-miR-25-3p, hsa-miR-103a-3p, hsa-miR-1285-3p, hsa-miR-7977, hsa-miR-30b-5p, hsa-miR-363-3p, hsa-miR-93-5p, hsa-miR-375-3p, hsa-miR-99b-5p, hsa-miR-193b-3p, hsa-miR-324-3p, hsa-miR-193a-3p, hsa-miR-342-3p, hsa-miR-484, hsa-miR-532-3p, hsa-miR-210-3p, hsa-miR-2110, hsa-miR-296-5p, hsa-miR-1307-5p, hsa-miR-19a-3p, hsa-miR-139-5p, hsa-miR-3665, hsa-miR-RG-84, hsa-miR-4454, and hsa-let-7b-5p; and
nucleotide sequences of corresponding 5′-terminus amplification primers are shown in SEQ ID NO: 1 to SEQ ID NO: 97, respectively;
with the first preamplification product as a template, conducting a second PCR preamplification using the transition primer and the reverse primer for amplifying the isomiR in the primer set according to claim 3 to obtain a second preamplification product; and
with the second preamplification product as a template, conducting a third PCR preamplification using the 5′ universal primer and the 3′ universal primer in the primer set according to claim 3 to obtain a third preamplification product, which is the isomiR.

5. A double unique dual indexing amplification primer set for construction of a high-throughput sample library for next-generation sequencing (NGS), comprising primers for adding an inner double unique dual index (DUDI) and primers for adding an outer DUDI and a sequencing adapter,
wherein a forward primer among the primers for adding an inner DUDI is obtained by linking a DNA fragment shown in SEQ ID NO: 2055, an I5 Index sequence, and a DNA fragment shown in SEQ ID NO: 2056 sequentially;
a reverse primer among the primers for adding an inner DUDI is obtained by linking a DNA fragment shown in SEQ ID NO: 2057, an I7 Index sequence, and a DNA fragment shown in SEQ ID NO: 2058 sequentially;
a forward primer among the primers for adding an outer DUDI and a sequencing adapter is obtained by linking a DNA fragment shown in SEQ ID NO: 2059, the I5 Index sequence, and a DNA fragment shown in SEQ ID NO: 2060 sequentially;
a reverse primer among the primers for adding an outer DUDI and a sequencing adapter is obtained by linking a DNA fragment shown in SEQ ID NO: 2061, the I7 Index sequence, and a DNA fragment shown in SEQ ID NO: 2062 sequentially;
a nucleotide sequence of the I5 Index sequence is one selected from the group consisting of SEQ ID NO: 103 to SEQ ID NO: 1078; and
a nucleotide sequence of the I7 Index sequence is one selected from the group consisting of SEQ ID NO: 1079 to SEQ ID NO: 2054.

6. A kit for construction of a high-throughput sample library for NGS, comprising the primer set for amplification of an isomiR according to claim 1, the double unique dual indexing amplification primer set, the double unique dual indexing amplification primer set comprises primers for adding an inner double unique dual index (DUDI) and primers for adding an outer DUDI and a sequencing adapter,
wherein a forward primer among the primers for adding an inner DUDI is obtained by linking a DNA fragment shown in SEQ ID NO: 2055, an I5 Index sequence, and a DNA fragment shown in SEQ ID NO: 2056 sequentially;
a reverse primer among the primers for adding an inner DUDI is obtained by linking a DNA fragment shown in SEQ ID NO: 2057, an I7 Index sequence, and a DNA fragment shown in SEQ ID NO: 2058 sequentially:
a forward primer among the primers for adding an outer DUDI and a sequencing adapter is obtained by linking a DNA fragment shown in SEQ ID NO: 2059, the I5 Index sequence, and a DNA fragment shown in SEQ ID NO: 2060 sequentially;
a reverse primer among the primers for adding an outer DUDI and a sequencing adapter is obtained by linking a DNA fragment shown in SEQ ID NO: 2061, the I7 Index sequence, and a DNA fragment shown in SEQ ID NO: 2062 sequentially;
a nucleotide sequence of the I5 Index sequence is one selected from the group consisting of SEQ ID NO: 103 to SEQ ID NO: 1078; and
a nucleotide sequence of the I7 Index sequence is one selected from the group consisting of SEQ ID NO: 1079 to SEQ ID NO: 2054; and 2× boost mix,
wherein the 2× Boost mix comprises the following components: water as a solvent, Tris-HCl: 70 mmol/L to 80 mmol/L, (NH₄)₂SO₄: 15 mmol/L to 25 mmol/L, Triton-100: 0.08% to 0.12% in a volume concentration, MgCl₂: 2 mmol/L to 3 mmol/L, dNTPs: 150 μmol/L to 250 μmol/L, trehalose: 190 mmol/L to 210 mmol/L, and hot-start Taq DNA polymerase: 45,000 U/L to 55,000 U/L; a pH of the Tris-HCl is 8.5 to 9.0; and
the dNTPs refers to a dNTP mixed solution that comprises UDG and does not comprise dUTP.

7. A method for construction of a high-throughput sample library for NGS, comprising the following steps:
with the third preamplification product obtained by the method according to claim 4 as a template, conducting a first PCR amplification using the primers for adding an inner DUDI in the double unique dual indexing amplification primer set to obtain an inner unique dual index (IUDI)-containing PCR product; the double unique dual indexing amplification primer set comprises primers for adding an inner double unique dual index (DUDI) and primers for adding an outer DUDI and a sequencing adapter,
wherein a forward primer among the primers for adding an inner DUDI is obtained by linking a DNA fragment shown in SEQ ID NO: 2055, an I5 Index sequence, and a DNA fragment shown in SEQ ID NO: 2056 sequentially;
a reverse primer among the primers for adding an inner DUDI is obtained by linking a DNA fragment shown in SEQ ID NO: 2057, an I7 Index sequence, and a DNA fragment shown in SEQ ID NO: 2058 sequentially;
a forward primer among the primers for adding an outer DUDI and a sequencing adapter is obtained by linking a DNA fragment shown in SEQ ID NO: 2059, the I5 Index sequence, and a DNA fragment shown in SEQ ID NO: 2060 sequentially;
a reverse primer among the primers for adding an outer DUDI and a sequencing adapter is obtained by linking a DNA fragment shown in SEQ ID NO: 2061, the I7 Index sequence, and a DNA fragment shown in SEQ ID NO: 2062 sequentially;
a nucleotide sequence of the I5 Index sequence is one selected from the group consisting of SEQ ID NO: 103 to SEQ ID NO: 1078; and a nucleotide sequence of the I7 Index sequence is one selected from the group consisting of SEQ ID NO: 1079 to SEQ ID NO: 2054;
with the IUDI-containing PCR product as a template, conducting a second PCR amplification using the primers for adding an outer DUDI and a sequencing adapter in the double unique dual indexing amplification primer set to obtain a DUDI-containing PCR product; and pooling to obtain a sequencing library; the double unique dual indexing amplification primer set comprises primers for adding an inner double unique dual index (DUDI) and primers for adding an outer DUDI and a sequencing adapter,
wherein a forward primer among the primers for adding an inner DUDI is obtained by linking a DNA fragment shown in SEQ ID NO: 2055, an I5 Index sequence, and a DNA fragment shown in SEQ ID NO: 2056 sequentially;
a reverse primer among the primers for adding an inner DUDI is obtained by linking a DNA fragment shown in SEQ ID NO: 2057, an I7 Index sequence, and a DNA fragment shown in SEQ ID NO: 2058 sequentially;
a forward primer among the primers for adding an outer DUDI and a sequencing adapter is obtained by linking a DNA fragment shown in SEQ ID NO: 2059, the I5 Index sequence, and a DNA fragment shown in SEQ ID NO: 2060 sequentially;
a reverse primer among the primers for adding an outer DUDI and a sequencing adapter is obtained by linking a DNA fragment shown in SEQ ID NO: 2061, the I7 Index sequence, and a DNA fragment shown in SEQ ID NO: 2062 sequentially;
a nucleotide sequence of the I5 Index sequence is one selected from the group consisting of SEQ ID NO: 103 to SEQ ID NO: 1078; and
a nucleotide sequence of the I7 Index sequence is one selected from the group consisting of SEQ ID NO: 1079 to SEQ ID NO: 2054.

8. The method for construction of a high-throughput sample library for NGS according to claim 6, further comprising: precipitating a pooled DUDI-containing PCR product, and removing PCR primers from a product precipitate with an ExoI enzyme to obtain the sequencing library.

9. A method of use of the primer set for amplification of an isomiR according to claim 1 in construction of a prediction model for artificial intelligent diagnosis of a tumor based on NGS.

10. The method according to claim 9, wherein the tumor comprises gastric cancer.

11. A kit for construction of a high-throughput sample library for NGS, comprising the primer set for amplification of an isomiR according to claim 2, the double unique dual indexing amplification primer set, the double unique dual indexing amplification primer set comprises primers for adding an inner double unique dual index (DUDI) and primers for adding an outer DUDI and a sequencing adapter,
wherein a forward primer among the primers for adding an inner DUDI is obtained by linking a DNA fragment shown in SEQ ID NO: 2055, an I5 Index sequence, and a DNA fragment shown in SEQ ID NO: 2056 sequentially;
a reverse primer among the primers for adding an inner DUDI is obtained by linking a DNA fragment shown in SEQ ID NO: 2057, an I7 Index sequence, and a DNA fragment shown in SEQ ID NO: 2058 sequentially;
a forward primer among the primers for adding an outer DUDI and a sequencing adapter is obtained by linking a DNA fragment shown in SEQ ID NO: 2059, the I5 Index sequence, and a DNA fragment shown in SEQ ID NO: 2060 sequentially;
a reverse primer among the primers for adding an outer DUDI and a sequencing adapter is obtained by linking a DNA fragment shown in SEQ ID NO: 2061, the I7 Index sequence, and a DNA fragment shown in SEQ ID NO: 2062 sequentially;
a nucleotide sequence of the I5 Index sequence is one selected from the group consisting of SEQ ID NO: 103 to SEQ ID NO: 1078; and
a nucleotide sequence of the I7 Index sequence is one selected from the group consisting of SEQ ID NO: 1079 to SEQ ID NO: 2054; and 2× boost mix,
wherein the 2× Boost mix comprises the following components: water as a solvent, Tris-HCl: 70 mmol/L to 80 mmol/L, (NH₄)₂SO₄: 15 mmol/L to 25 mmol/L, Triton-100: 0.08% to 0.12% in a volume concentration, MgCl₂: 2 mmol/L to 3 mmol/L, dNTPs: 150 μmol/L to 250 μmol/L, trehalose: 190 mmol/L to 210 mmol/L, and hot-start Tag DNA polymerase: 45,000 U/L to 55,000 U/L; a pH of the Tris-HCl is 8.5 to 9.0; and
the dNTPs refers to a dNTP mixed solution that comprises UDG and does not comprise dUTP.

12. A kit for construction of a high-throughput sample library for NGS, comprising the primer set for amplification of an isomiR according to claim 3, the double unique dual indexing amplification primer set, the double unique dual indexing amplification primer set comprises primers for adding an inner double unique dual index (DUDI) and primers for adding an outer DUDI and a sequencing adapter,
wherein a forward primer among the primers for adding an inner DUDI is obtained by linking a DNA fragment shown in SEQ ID NO: 2055, an I5 Index sequence, and a DNA fragment shown in SEQ ID NO: 2056 sequentially;
a reverse primer among the primers for adding an inner DUDI is obtained by linking a DNA fragment shown in SEQ ID NO: 2057, an I7 Index sequence, and DNA fragment shown in SEQ ID NO: 2058 sequentially;
a forward primer among the primers for adding an outer DUDI and a sequencing adapter is obtained by linking a DNA fragment shown in SEQ ID NO: 2059, the I5 Index sequence, and a DNA fragment shown in SEQ ID NO: 2060 sequentially;
a reverse primer among the primers for adding an outer DUDI and a sequencing adapter is obtained by linking a DNA fragment shown in SEQ ID NO: 2061, the I7 Index sequence, and a DNA fragment shown in SEQ ID NO: 2062 sequentially;
a nucleotide sequence of the I5 Index sequence is one selected from the group consisting of SEQ ID NO: 103 to SEQ ID NO: 1078; and
a nucleotide sequence of the I7 Index sequence is one selected from the group consisting of SEQ ID NO: 1079 to SEQ ID NO: 2054; and 2× boost mix,
wherein the 2× Boost mix comprises the following components: water as a solvent, Tris-HCl: 70 mmol/L to 80 mmol/L, (NH₄)₂SO₄: 15 mmol/L to 25 mmol/L, Triton-100: 0.08% to 0.12% in a volume concentration, MgCl₂: 2 mmol/L to 3 mmol/L, dNTPs: 150 μmol/L to 250 μmol/L, trehalose: 190 mmol/L to 210 mmol/L, and hot-start Tag DNA polymerase: 45,000 U/L to 55,000 U/L; a pH of the Tris-HCl is 8.5 to 9.0; and
the dNTPs refers to a dNTP mixed solution that comprises UDG and does not comprise dUTP.

13. A method of use of the primer set for amplification of an isomiR according to claim 2 in construction of a prediction model for artificial intelligent diagnosis of a tumor based on NGS.

14. A method of use of the primer set for amplification of an isomiR according to claim 3 in construction of a prediction model for artificial intelligent diagnosis of a tumor based on NGS.

15. A method of use of an isomiR amplified by the method according to claim 4 in construction of a prediction model for artificial intelligent diagnosis of a tumor based on NGS.

16. A method of use of the double unique dual indexing amplification primer set according to claim 5 in construction of a prediction model for artificial intelligent diagnosis of a tumor based on NGS.

17. The method according to claim 13, wherein the tumor comprises gastric cancer.

18. The method according to claim 14, wherein the tumor comprises gastric cancer.

19. The method according to claim 15, wherein the tumor comprises gastric cancer.

20. The method according to claim 16, wherein the tumor comprises gastric cancer.
